(19) United States
(12) Patent Application Publication
(10) Pub. No.: US 2025/0380706 A1
(43) Pub. Date: Dec. 18, 2025

(54) ENDOPHYTIC MICROBIAL BIOSTIMULANTS

(71) Applicant: Evonik Operations GmbH, Essen (DE)

(72) Inventors: Stefan GILCH, Dülmen (DE); Hans-Georg HENNEMANN, Bedburg (DE); Linda MICHEEL, Dorsten (DE); Julia NIEWALDA, Selm (DE); Hanna-Christin LAKOWITZ, Bochum (DE); Moritz Sebastian ENGEMANN, Dortmund (DE)

(73) Assignee: Evonik Operations GmbH, Essen (DE)

(21) Appl. No.: 19/107,916

(22) PCT Filed: Aug. 24, 2023
(86) PCT No.: PCT/EP2023/073204

§ 371 Date: Feb. 28, 2025

(30) Foreign Application Priority Data
Sep. 1, 2022 (EP) 22193371.6

(51) Int. Cl. A01N 63/20; A01N 25/04; A01P 21/00; C12N 1/20; C12R 1/41

(52) U.S. Cl. CPC A01N 63/20; A01N 25/04; A01P 21/00; C12N 1/205; C12R 2001/41

(57) ABSTRACT

The present invention relates to a composition comprising:
an isolated endophyte, wherein the endophyte is a strain of Rhizobium metallidurans, and
an adjuvant and wherein the Rhizobium metallidurans strain has Accession Number DSM34351.

### FIELD OF THE INVENTION

[0001] The present invention relates to a novel isolated plant microbiome strain, in particular an endophyte, plants infected with such strains and related methods. In particular, the isolated endophyte may be used in a composition for use as a biofertilizer and/or biostimulant or for bioprotection in plants. The composition may further comprise an adjuvant.

### BACKGROUND OF THE INVENTION

[0002] In many cases, the growth and/or yield of agricultural crops is limited by the amount of nitrogen that can be used or taken up by the plant. In order to overcome this limitation, exogenous nitrogen is added to the soil before or after sowing. The nitrogen fertilizer can be of organic (e.g., urea, amino acids, manure, horn shavings) or mineral (e.g. ammonium nitrate, ammonium sulphate, potassium nitrate) origin in nature. What all these anthropogenic nitrogen fertilizers have in common is that their production, transport and/or application is energy-intensive and thus leads to a positive CO₂ balance. In particular, ammonium nitrate and urea, which are by far the most widely used nitrogen fertilizers worldwide, have a large CO₂ footprint because their common precursor ammonia (NH₃), is derived from the Haber-Bosch process. This process uses atmospheric nitrogen (N₂) and hydrogen (H₂) to synthesize ammonia (NH₃) under high temperatures and pressures. This is process thus adds to climate change and is not good for the environment.

[0003] An alternative and more sustainable method to provide plants with at least some part of the nitrogen they need is to use biofertilizers. Biofertilizers are made up of living microorganisms that are able to reduce atmospheric nitrogen and thus make it available to the plant in form of ammonium/ammonia or organically bound nitrogen. These organisms have to be applied in a metabolically active form to the seed, root or in rarer cases to the leaf.

[0004] Previous and current use of these biofertilizers apply the nitrogen-fixing microorganisms either to the surface of the seed, to the leaf or the soil. Due to this fact, the organisms are exposed to high stress from abiotic factors such as temperature, drought, pH, and wash-off from rain and high moisture. The effectiveness and efficiency of the biofertilizers is reduced. A large amount of the biofertilizers is thus needed to enable them to be effective in providing bioprotection to the plants and/or increasing yield of the crops. This increases the costs of farming.

[0005] Further, biotic factors such as high competition with the already predominant plant or soil microbiome or the presence of antibiotically active substances also reduce the survival rate of the exogenously added nitrogen-fixing microorganisms on the respective surfaces. This also reduces the efficiency of the currently available biofertilizers.

[0006] Accordingly, there is a need in the art for a means to better exploit these endophytes for use as biofertilizers and/or biostimulants to improve sustainable agriculture and the environment.

### BRIEF DESCRIPTION OF FIGURES

[0007] FIG. 1 is a picture of maize growth (without treatment) after 6 eight weeks under different nitrogen fertilization (0 kgN/ha, 21 kgN/ha, 42 kgN/ha). Nutrient-poor Oxisol soil was used as test soil (substrate).

[0008] FIG. 2 is a picture of maize growth at 21 kgN/ha, once without (left) and once with application of Rhizobium metallidurans DSM 34351, which was applied in a mixture with S301® to the leaf only.

[0009] FIG. 3 is a graph showing shoot dry matter of maize at different nitrogen fertilizer levels, with and without application of Rhizobium metallidurans DSM 34351, which was applied in a mixture with S301®.

[0010] FIG. 4 is a graph showing root dry matter of maize at different nitrogen fertilizer levels, with and without application of Rhizobium metallidurans DSM 34351, which was applied in a mixture with S301®.

[0011] FIG. 5 is a graph showing the increase in yield of the crop in the presence of Rhizobium metallidurans DSM 34351.

### DESCRIPTION OF THE INVENTION

[0012] The present invention attempts to solve the problems above by providing a novel isolated endophyte from Rhizobium metallidurans that is capable of being an effective and efficient biostimulant and/or biofertilizer. These newly isolated endophytes, which due to their unique genetic equipment and/or in the presence of specific adjuvants, are able to enable and especially enforce the penetration of these endophytes into the plant or part thereof to which the endophyte is brought into contact with. In particular, in the presence of the right adjuvant, the newly isolated Rhizobium metallidurans strain is able to penetrate and proliferate in the plant tissue or seed. This way, (a)biotic stress can be reduced and thus the survivability or effectiveness of the organism in the plant is significantly increased. Inside the plant or seed or any part thereof, the active Rhizobium metallidurans strain is in a regulated homeostasis, which increases both the efficacy and survivability of the nitrogen-fixing endophyte.

[0013] According to one aspect of the present invention, there is provided, a substantially purified or isolated endophyte, wherein the endophyte is a strain of Rhizobium metallidurans which provides bioprotection and/or biostimulant phenotypes to plants into which it is introduced and wherein the Rhizobium metallidurans strain has Accession Number DSM34351.

[0014] The newly isolated endophyte, Rhizobium metallidurans, according to any aspect of the present invention solves the problem of low stability of microbial nitrogen fixers as it is an endophytic organism that has both an unprecedented high nitrogen fixation capacity and the ability to penetrate into the endosphere of the plant that most other existing endophytes used in agriculture do not have.

[0015] The endophyte according to any aspect of the present invention was isolated from the inner plant tissue of a copper flower (Minuartia verna subsp. hercynica) and typed and sequenced as Rhizobium metallidurans sp. Greenhouse experiments demonstrated that Rhizobium metallidurans is capable of providing significant amounts of enzymatically fixed nitrogen to the plant in both seed and foliar applications to maize (Zea mays, variant LG 31.224). Thus, maize inoculated or sprayed with Rhizobium metallidurans was able to show the same or even improved growth as fully fertilized maize (42 kg/ha) when fertilized only with half of the synthetic nitrogen fertilizer (21 kg/ha). In comparison, significantly reduced growth was observed in maize not inoculated with Rhizobium metallidurans at 21 kgN/ha.

[0016] As used herein, the term “endophyte” is an endosymbiont, which refers to a bacterial or fungal strain that lives within a plant for at least part of its life cycle without causing apparent disease. In particular, the bacteria or the fungus is closely associated with the plant where the term ‘closely associated’ refers to the bacteria or fungus living on, in or in close proximity to the plant. For example, it may be endophytic, and living within the internal tissues of the plant, or epiphytic, and growing externally on the plant. There are many different endophytes that have been discovered. However, only a few have been commercially used as endophytic inoculants for agriculture such as arbuscular mycorrhizae, rhizobia, and Azospirillium. Clavicipitaceous fungi is also an endophyte that is used in agriculture. The endophyte according to any aspect of the present invention is a strain of Rhizobium metallidurans with Accession Number DSM 34351.

[0017] As used herein the term “substantially purified” refers to an endophyte being free of other organisms. The term includes, for example, an endophyte in axenic culture. Particularly, the endophyte is at least about 90% pure, more particularly at least about 95% pure, even more particularly at least about 98%, 99% or 99.5% pure.

[0018] As used herein the term ‘isolated’ refers to an endophyte according to any aspect of the present invention that is removed from its original environment (e.g., the natural environment if it is naturally occurring). For example, a naturally occurring endophyte present in a living plant is not isolated, but the same endophyte separated from some or all of the coexisting materials in the natural system, is isolated. In particular, the isolated endophyte according to any aspect of the present invention may be a pure culture of a single strain and this single strain was submitted to the German Collection of Microorganisms and Cell Cultures (DSMZ) located in Inhoffenstraße 7B, 38124 Braunschweig, Germany on 11 Aug. 2022 and has Accession Number DSM 34351. Particles for keeping and modifying cells are available from the prior art, for example Sambrook/Fritsch/Maniatis (1989).

[0019] As used herein the term “bioprotection and/or biostimulant” may refer to the endophyte according to any aspect of the present invention possessing genetic and/or metabolic characteristics that result in a beneficial phenotype in a plant harbouring, or otherwise associated with, the endophyte. Such beneficial properties or phenotypes resulting from the endophyte being present in the plant include improved resistance to pests and/or diseases, improved tolerance to water and/or nutrient stress, enhanced biotic stress tolerance, enhanced drought tolerance, enhanced water use efficiency, reduced toxicity and enhanced vigour in the plant with which the endophyte is associated, in comparison to a plant which is not associated with the endophyte according to any aspect of the present invention or to a endophyte such as standard toxic (ST) endophyte. In particular, the bioprotection and/or biostimulant phenotype according to any aspect of the present invention includes nitrogen fixation in the plant into which the endophyte is introduced.

[0020] The pests and/or diseases may include, but are not limited to, fungal and/or bacterial pathogens, particularly, fungal. In one example, the endophyte may result in the production of the bioprotectant compound in the plant with which it is associated.

[0021] As used herein, the term ‘bioprotectant compound’ refers to a compound that provides or aids in providing bioprotection to the plant with which it is associated against pests and/or diseases, such as bacterial and/or fungal pathogens. A bioprotectant compound may also be known as a ‘biocidal compound’.

[0022] As used herein, the term ‘biostimulant’ refers to any substance or microorganism applied to plants with the aim to enhance nutrition efficiency, abiotic stress tolerance and/or crop quality traits, regardless of its nutrients content. The endophyte according to any aspect of the present invention acts as a biostiumulant to the plant and/or part thereof to which it comes in contact with. A more detailed definition of biostimulant is provided at least in Ricci, M., General Principles to Justify Plant Biostimulant Claims, Frontiers in Plant Science (2019), 10.

[0023] As used herein the term ‘introduce’ refers to the contact and/or treatment of a plant or part thereof with an endophyte where the endophyte is delivered to the plant. In particular, the endophyte is introduced into the plant or part thereof to encourage the endophyte to grow there. Any method of introduction of the endophyte according to any aspect of the present invention to the plant or part thereof may be used. For example, the endophyte may be sprayed on or inoculated in the plant or part thereof. In particular, the endophyte may be inoculated for at least 1, 2, 3, 4, 5, 6, 7, 8, 9, 10, 11, 12, 13 or 14 days before they start to grow in the plant. In one example, the endophyte may be sprayed on the leaves of the plant (i.e. foliar application. In this example, the spraying process takes place either only in the early development stage of the plant (around the six leaf stage) or multiple times (around the six leaf stage and several stages of the emerging/adult plant). A skilled person would be capable of identifying the best introduction process to be used on the plant. In particular, the plant or part thereof may be infected with the endophyte by a method known in the art. More in particular, the plant or part thereof may be infected with the endophyte using a method selected from the group consisting of inoculation, spraying, breeding, crossing, hybridisation, transduction, transfection, transformation and/or gene targeting and combinations thereof.

[0024] In particular, the endophyte according to any aspect of the present invention is the endophyte Rhizobium metallidurans strain with Accession Number DSM 34351. In particular, the sequence of the strain has been divided into loci and comprises the nucleotide sequence of SEQ ID NOs:1-99 and variants thereof. In particular, the sequence of the 16S ribosomal RNA is SEQ ID NO:71.

[0025] The term “variant”, as used herein, comprises amino acid or nucleic acid sequences, respectively, that are at least 70, 75, 80, 85, 90, 92, 94, 95, 96, 97, 98 or 99% identical to the reference amino acid or nucleic acid sequence, wherein preferably amino acids other than those essential for the function, for example the catalytic activity of a protein, or the fold or structure of a molecule are deleted, substituted or replaced by insertions or essential amino acids are replaced in a conservative manner to the effect that the biological activity of the reference sequence or a molecule derived therefrom is preserved. The state of the art comprises algorithms that may be used to align two given nucleic acid or amino acid sequences and to calculate the degree of identity, see Arthur Lesk (2008), Thompson et al., 1994, and Katoh et al., 2005. The term “variant” is used synonymously and interchangeably with the term “homologue”. Such variants may be prepared by introducing deletions, insertions or substitutions in amino acid or nucleic acid sequences as well as fusions comprising such macromolecules or variants thereof. In one example, the term “variant”, with regard to amino acid sequence, comprises, in addition to the above sequence identity, amino acid sequences that comprise one or more conservative amino acid changes with respect to the respective reference or wild type sequence or comprises nucleic acid sequences encoding amino acid sequences that comprise one or more conservative amino acid changes. In one example, the term “variant” of an amino acid sequence or nucleic acid sequence comprises, in addition to the above degree of sequence identity, any active portion and/or fragment of the amino acid sequence or nucleic acid sequence, respectively, or any nucleic acid sequence encoding an active portion and/or fragment of an amino acid sequence. The term “active portion”, as used herein, refers to an amino acid sequence or a nucleic acid sequence, which is less than the full-length amino acid sequence or codes for less than the full-length amino acid sequence, respectively, wherein the amino acid sequence or the amino acid sequence encoded, respectively retains at least some of its essential biological activity.

[0026] According to another aspect of the present invention, there is provided a biostimulant comprising an isolated endophyte, wherein the endophyte is a strain of Rhizobium metallidurans with Accession Number DSM 34351. The endophyte is according to any aspect of the present invention.

[0027] According to a further aspect of the present invention, there is provided a composition comprising:
[0028] an isolated endophyte, wherein the endophyte is a strain of Rhizobium metallidurans, and
[0029] an adjuvant, wherein the Rhizobium metallidurans strain has Accession Number DSM34351.

[0030] The composition according to any aspect of the present invention solves the problem of low uptake rates and uptake kinetics of endophytic organisms into the endosphere of the plant. Adjuvants enable both an efficient uptake through stomata on the upper and most prominent on the lower surface of the plants, little injury wounds and growth gaps in the cuticula. The use of adjuvants to support the endophytic process (the penetration of the microorganism, particularly Rhizobium metallidurans into the plant cell) allows the use of lower drug concentrations (CFU/mL or CFU/g) because uptake occurs more effectively than without the addition of adjuvants. The endophyte is the Rhizobium metallidurans strain which Accession Number DSM 34351.

[0031] The isolated Rhizobium metallidurans strain according to any aspect of the present invention has the appropriate genetic equipment to invade the plant tissue and survive and proliferate within the tissue. This in combination with the suitable penetration sites on the plant and/or seed surfaces with which the Rhizobium metallidurans strain is inoculated enables the endophytes to successfully penetrate the plant tissue via the stomata of the leaves or via small injuries or growth gaps. Active penetration of the non-uniformly shaped cuticle has also been reported.

[0032] However, since both speed and kinetics of the endophytic process is limited in nature and thus occurs in most cases very slowly and host specific, the presence of an adjuvant in the composition according to any aspect of the present invention enables a successful uptake of the endophyte according to any aspect of the present invention into the plant tissue (endosphere) efficiently and effectively.

[0033] Usually when Rhizobium metallidurans alone is applied to the soil, leaf, or seed, a slow endophytic process results in the exposure of the organism to biotic and abiotic stresses for a correspondingly long time. This can lead to a significant reduction in Rhizobium metallidurans titer and thus reduced efficacy of the product. The presence of the adjuvant according to any aspect of the present invention cancels this negative effect and in fact increases the efficacy of the composition by accelerating the uptake of the organisms into the target plant or to enable it at all.

[0034] An ‘adjuvant’ as used herein, refers to an ingredient or a substance in the composition according to any aspect of the present invention that increases or modifies the activity of the other ingredients namely, the isolated Rhizobium metallidurans strain. In particular, the adjuvants according to any aspect of the present invention are biocompatible adjuvant (active ingredient mediator) that are added to the suspension of microorganisms to form the composition according to any aspect of the present invention. Any adjuvant known in the art may be used in the composition according to any aspect of the present invention. In particular, the adjuvants according to any aspect of the present invention may be selected from the group consisting of (A), (B) or (C) and mixtures thereof wherein (A), (B) or (C) are:
[0035] (A) a polyglycerol ester with a general formula (I) of,

[chemical structure]

[0036] wherein, M is [C₃H₅(OR″)₂O_{1/2}],
   [0037] D is [C₃H₅(OR″)₁O_{2/2}],
   [0038] T is [C₃H₅O_{3/2}],
[0039] j=1 to 10, preferably 2 to 3, more preferably 2;
[0040] k=0 to 10, preferably greater than 0 to 5, more preferably 1 to 3;
[0041] l=0 to 3, preferably 0 to 1, more preferably 0;
[0042] wherein, the sum total of j+k+l is 1 to 20, preferably 2 to 4, more preferably 3 wherein the radicals R″ are each independently selected from the group consisting of acyl radicals R′—C(═O)— and H, with the proviso that at least one radical R″ is not equal to H;
[0043] wherein the radicals R′ are each independently selected from the group consisting of monovalent aliphatic, saturated or unsaturated hydrocarbon radicals with 3 to 39, preferably 7 to 21 more preferably with 9 to 17 carbon atoms;
[0044] (B) polyether-modified siloxanes of formula (II)

[chemical structure]

[0045] wherein, M¹ is P¹₃SiO_{1/2},
   [0046] D¹ is P¹₂SiO_{2/2}, D′ is P¹P²SiO_{2/2},
   [0047] o is 2, p is between 0 and 0.1, q is between 1.0 and 1.15,
   [0048] P¹ are independently hydrocarbyl having 1 to 8 carbon atoms,
   [0049] P² are independently a polyether radical of the formula (III)

[chemical structure]

[0050] where
   [0051] m is from 3.4 to 11.0, n is from 2.5 to 8.0,
   [0052] and with the provisos that
   [0053] m/n is from 1.9 to 2.8,
   [0054] P³ are independently divalent hydrocarbyl radicals having 2 to 8 carbon atoms,
   [0055] P⁵ is hydrogen; and/or
[0056] (C) organomodified polysiloxane of formula (IV)

[chemical structure]

[0057] where a+b+c+d+2=20 to 210,
   [0058] a is 15 to 205, b is 1 to 12, c is 1 to 12, d is 1 to 12,
[0059] the R radicals are each independently identical or different, aliphatic or aromatic hydrocarbyl radicals having 1 to 10 carbon atoms,
[0060] the R4 radicals are each independently identical or different R, R1 R2 or R3 radicals,
[0061] the R1, R2 and R3 radicals are each independently different polyether radicals of general formula (V)

[chemical structure]

[0062] where
   [0063] e is 3 to 11, f is 6 to 30, g is 0 to 15, h s 0 to 5, i is to 5, and
[0064] R5 are independently the same or different and are each a methyl, acetyl or hydrogen radical.

[0065] More in particular, the adjuvants may be selected from the group consisting of BREAK-THRU® S 301, BREAK-THRU® SP 133, BREAK-THRU® S 255. The adjuvants used according to any aspect of the present invention leads to a reduction of the surface tension at the stomata or where there are injuries and thus to a lower rejection or an improved flow of the particles (microorganisms) through the orifices into the plant or part thereof where the microorganisms particularly Rhizobium metallidurans is inoculated. In particular, the use of adjuvants enables/accelerates the endophytic process of bacteria uptake. In addition, enhanced uptake also allows translocation of bacteria across the phloem from the leaf to the root, from where nitrogen fixation can also be enhanced. This results in the locally applied biostimulant acquiring a systemic character. Based on its systemic character, there is the advantage that in shoot-forming plants also the shoot is already inoculated with the biostimulant and thus passes the active ingredient on to the new generation.

[0066] The use of adjuvants also allows a uniform distribution of the Rhizobium metallidurans from the upper leaf surface to the lower leaf surface where most (opened) stomata are present. Thus, faster and more widespread penetration of endophytes into plant tissue is enabled. Without the use of biocompatible adjuvants, especially in the case of foliar application, reaching the stomata on the underside of the leaf would be particularly hard if not impossible. The use of adjuvants with “anti-rinse-off” properties also increases the residence time on the upper surface of the leaf and thus promotes endophytic uptake into the plant tissue. The presence of the adjuvant reduces early wash-off of the endophytic nitrogen fixating organisms.

[0067] In one example, the adjuvant is (A):
[0068] (A) a polyglycerol ester with a general formula (I) of,

[chemical structure]

[0069] wherein, M is [C₃H₅(OR″)₂O_{1/2}],
   [0070] D is [C₃H₅(OR″)₁O_{2/2}],
   [0071] T is [C₃H₅O_{3/2}],
[0072] j=1 to 10, preferably 2 to 3, more preferably 2;
[0073] k=0 to 10, preferably greater than 0 to 5, more preferably 1 to 3;
[0074] l=0 to 3, preferably 0 to 1, more preferably 0;
[0075] wherein, the sum total of j+k+l is 1 to 20, preferably 2 to 4, more preferably 3 wherein the radicals R″ are each independently selected from the group consisting of acyl radicals R′—C(═O)— and H, with the proviso that at least one radical R″ is not equal to H;
[0076] wherein the radicals R′ are each independently selected from the group consisting of monovalent aliphatic, saturated or unsaturated hydrocarbon radicals with 3 to 39, preferably 7 to 21 more preferably with 9 to 17 carbon atoms.

[0077] In particular, at least one radical R″ corresponds to a radical of the formula R′—C(O)—.

[0078] More in particular, M, D and T may be:

[chemical structure]

[0079] Even more in particular, the polyglycerol esters of the mixture according to any aspect of the present invention is of the Formula (I(a)):

[chemical structure]

[0080] wherein
[0081] a=1 to 10, preferably 2 to 3, more in particular 2;
[0082] b=0 to 10, preferably greater than 0 to 5, more in particular 1 to 3;
[0083] with the proviso that:
[0084] a+b=2 to 20, preferably 2 to 4, especially 3;
[0085] wherein the radicals R″ are each independently selected from the group consisting of acyl radicals R′—C(═O)— and H, with the proviso that at least one radical R is not equal to H; where the radicals R′ are each independently selected from the group consisting of monovalent aliphatic, saturated or unsaturated hydrocarbon radicals with 3 to 39, preferably 7 to 21, in particular with 9 to 17 carbon atoms.

[0086] The polyglycerol esters of the composition according to any aspect of the present invention may have more than one radical R″ of the form R′—C(═O)—, particularly at least 2, more particularly at least 3.

[0087] The radicals R″ of the formula R′—C(O)— may be independent of each another identical or different acyl radicals of saturated or unsaturated fatty acids, where the fatty acids include 4 up to 40 carbon atoms, particularly, the fatty acids are selected from the group consisting of butyric acid (butanoic acid), caproic acid (hexanoic acid), caprylic acid (octanoic acid), capric acid (decanoic acid), lauric acid (dodecanoic acid), myristic acid (tetradecanoic acid), palmitic acid (hexadecanoic acid), stearic acid (octadecanoic acid), arachidic acid (eicosanoic acid), behenic acid (docosanoic acid), lignoceric acid (tetracosanoic acid), palmitoleic acid ((Z)-9-hexadecenoic acid), oleic acid ((Z)-9-hexadecenoic acid), elaidic acid ((E)-9-octadecenoic acid), cis-vaccenic acid ((Z)-11-octadecenoic acid), linoleic acid ((9Z,12Z)-9,12-octadecadienoic acid), alpha-linolenic acid ((9Z,12Z,15Z)-9,12,15-octadecatrienoic acid), gamma-linolenic acid ((6Z,9Z,12Z)-6,9,12-octadecatrienoic acid), di-homo-gamma-linolenic acid ((8Z,11Z,14Z)-8,11,14-eicosatrienoic acid), arachidonic acid ((5Z,8Z,11Z,14Z)-5,8,11,14-eicosatetraenoic acid), erucic acid ((Z)-13-docosenoic acid), nervonic acid ((Z)-15-tetracosenoic acid), ricinoleic acid, hydroxystearic acid, undecenoic acid, and mixtures thereof. In one example, the fatty acid may be a mixture of rapeseed oil acids, soya fatty acids, sunflower fatty acids, peanut fatty acids and tall oil fatty acids. In particular, for this context, the fatty acids may be radicals of oleic acid. When calculating the HLB value, the molar mass of the lipophilic molecule moiety is the arithmetic mean of the total of the molar masses of all of the radicals R′ which are present in the molecule.

[0088] Sources of suitable fatty acids or fatty acid esters, especially glycerides, can be vegetable or animal fats, oils or waxes. For example, lard, beef tallow, goose fat, duck fat, chicken fat, horse fat, whale oil, fish oil, palm oil, olive oil, avocado oil, seed kernel oils, coconut oil, palm kernel oil, cocoa butter, cottonseed oil, pumpkin seed oil, maize seed oil, sunflower oil, wheat germ oil, grape seed oil, soybean oil, peanut oil, lupine oil, rapeseed oil, mustard oil, castor oil, jatropa oil, walnut oil, jojoba oil, lecithin, for example based on soy, rapeseed, or sunflower, bone oil, claw oil, borage oil, lanolin, emu oil, deer tallow, marmot oil, mink oil, safflower oil, hemp oil, pumpkin oil, evening primrose oil, tall oil, as well as carnauba wax, beeswax, candelilla wax, ouricuri wax, sugar cane wax, retamow wax caranday wax, raffia wax, esparto wax, alfalfa wax, bamboo wax, hemp wax, Douglas fir wax, cork wax, sisal wax, flax wax, cotton wax, dammar wax, tea wax, coffee wax, rice wax, oleander wax or wool wax may be sources of fatty acids or fatty acid esters.

[0089] In particular, the polyglycerol ester compounds have the formulas (I), or (I(a)) with an arithmetic mean of 2.9 to 3.1 radicals of the form R′—C(═O)— and an HLB value of 4 to 6.5.

[0090] More in particular, the polyglycerol ester compounds have the formula (I(a)) with the sum a+b being 3 and the arithmetic mean 2.9 to 3.1 radicals of the form R′—C(═O)— and an HLB-value of 4 to 6.5.

[0091] Even more in particular, the polyglycerol ester compounds may be of the formula (I(a)) which have an arithmetic mean of 2.9 to 3.1 radicals of the form R′—C(═O)— and an HLB value of 4 to 6.5, where the acyl residues of fatty acid mixtures containing oleic acid, stearic acid, palmitic acid and gamma-linolenic acid, and said fatty acids particularly making up at least 85% by weight in the fatty acid mixture.

[0092] In one example, the polyglycerol ester compounds may be of the formula (I(a)) which have an arithmetic mean of 2.9 to 3.1 radicals of the form R′—C(═O)— and an HLB value of 4 to 6.5, the acyl residues originate from fatty acid mixtures containing oleic acid, stearic acid, palmitic acid and gamma-linolenic acid, and said fatty acids particularly make up at least 85% by weight in the fatty acid mixture.

[0093] In another example, the polyglycerol ester compounds used according to any aspect of the present invention may be of the formula (I(a)) which have an arithmetic mean of 2.9 to 3.1 radicals of the form R′—C(═O)— and an HLB value of 4 to 6.5, the mass fraction of oleic acyl residues is at least 75%, particularly 85%, more particularly 95% based on the mass of all acyl residues. Even more in particular, the polyglycerol ester is triglycerol trioleate.

[0094] A more thorough disclosure of the adjuvant (B) is provided at least in U.S. Ser. No. 10/390,530B2.

[0095] In one example, the adjuvant is (B):
[0096] (B) polyether-modified siloxanes of formula (II)

[chemical structure]

[0097] wherein, M¹ is P¹₃SiO_{1/2},
   [0098] D¹ is P¹₂SiO_{2/2}, D′ is P¹P²SiO_{2/2},
[0099] is 2,
[0100] p is between 0 and 0.1, particularly 0
[0101] q is between 1.0 and 1.15, particularly between 1.0 and 1.10, especially particularly between 1.00 and 1.05,
[0102] P¹ are independently hydrocarbyl having 1 to 8 carbon atoms, particularly methyl, ethyl, propyl or phenyl radicals, especially particularly methyl radicals,
[0103] P² are independently a polyether radical of the formula (III)

[chemical structure]

[0104] where
[0105] m is from 3.4 to 11.0, particularly 3.6 to 9.9, more particularly 4.5 to 8.5,
[0106] n is from 2.5 to 8.0, particularly 2.7 to 7.5, more particularly 3.0 to 6.0, and with the provisos that
[0107] m/n is from 1.9 to 2.8,
[0108] P³ are independently divalent hydrocarbyl radicals having 2 to 8 carbon atoms, particularly ethylene, propylene, 1-methylpropylene, 1,1-dimethylpropylene radical, especially particularly —CH2CH2CH2-,
[0109] P⁵ is hydrogen.

[0110] The polyether-modified siloxanes of formula (II) have a biodegradability of greater than 60%, more particularly of greater than or equal to 63% and especially particularly of greater than or equal to 65%, the maximum value being 100%.

[0111] In particular, the polyether radical, calculated without P³O and calculated without P⁵, has a molar mass M(PE) calculated by 44 g/mol*m+58 g/mol*n where the indices m and n relate to formula (III). More in particular, the values of M(PE) are: lower limits M(PE) greater than 520 g/mol, particularly greater than 530 g/mol, more particularly greater than 535 g/mol; upper limit M(PE) less than 660 g/mol, particularly less than 630 g/mol, more particularly less than 600 g/mol. Even more in particular, the value of M(PE) is greater than 520 g/mol and less than 660 g/mol, especially greater than 535 g/mol and less than 600 g/mol. In particular, the sum total of m+n is greater than 9 up to 19, more in particular, than 9.5 up to 15 and even more in particular greater than 10 up to 12.

[0112] In one example, the polyether-modified siloxane used in the composition according to any aspect of the present invention is a polyether-modified siloxane of the formula (II) with an index c between 1 and 1.05, where the indices of the polyether radical of formula (III) are m from 3.4 to 11.0 and n from 2.5 to 8.0. In particular, the polyether-modified siloxane used in the composition according to any aspect of the present invention is a polyether-modified siloxane of the formula (II) with an index c between 1 and 1.05, where the ratio m/n is 1.9 to 2.8. More in particular, the polyether-modified siloxane used in the composition according to any aspect of the present invention is a polyether-modified siloxane of the formula (II) with an index c between 1 and 1.05, where the molar mass of the polyether residue M(PE) is greater than 520 g/mol and less than 660 g/mol. Even more in particular, the polyether-modified siloxane used in the composition according to any aspect of the present invention is a polyether-modified siloxane of the formula (II) with an index c between 1 and 1.05, where the P⁵ radical is hydrogen or with an index c between 1 and 1.05, where the molar mass of the polyether residue M(PE) is greater than 520 g/mol and less than 660 g/mol and the P₅ radical is hydrogen. In particular, the polyether-modified siloxane used in the composition according to any aspect of the present invention is a polyether-modified siloxane of the formula (II) does not include any further polyether-modified siloxanes apart from those of formula (II).

[0113] A more thorough disclosure of the adjuvant (B) is provided at least in U.S. Ser. No. 10/299,471 B2.

[0114] In one example, the adjuvant is (C), an organomodified polysiloxane of formula (IV)

[chemical structure]

[0115] where a+b+c+d+2=20 to 210, preferably 30 to 100, especially 40-60,
[0116] a is 15 to 205, preferably 35 to 45,
[0117] b is 1 to 12, preferably 1 to 8, especially 2 to 6,
[0118] c is 1 to 12, preferably 1 to 3, especially 2 to 6,
[0119] d is 1 to 12, preferably 1 to 3, especially 2 to 6,
[0120] the R radicals are each independently identical or different, aliphatic or aromatic hydrocarbyl radicals having 1 to 10 carbon atoms, preferably methyl radicals,
[0121] the R4 radicals are each independently identical or different R, R1, R2 or R3 radicals, the R1, R2 and R3 radicals are each independently different polyether radicals of general formula (V)

[chemical structure]

[0122] where
[0123] e is 3 to 11, preferably 3,
[0124] f is 6 to 30, preferably 10 to 30,
[0125] g is 0 to 15, preferably 0 to 10,
[0126] h is 0 to 5,
[0127] i is 0 to 5, and

[0128] R5 are independently the same or different and are each a methyl, acetyl or hydrogen radical preferably with the proviso that the molecular weight of the polyether radical of Formula (V) is greater than 200 g/mol, preferably from greater than 400 to 2000 g/mol, and the proportion of ethylene oxide is greater than 45% by mass in the polyether, and the percentage by mass of ethylene oxide in the polyether radical R2 is at least 9% by mass greater than the percentage of ethylene oxide in the polyether radical R1, based in each case on the polyether radicals of the Formula (V), where the radicals of the Formula (V) may each be formed randomly, in a gradient or in blocks.

[0129] In formula (V), the units designated by the index ‘g’ are those which have originated from propylene oxide, the units designated by the index ‘h’ are those which have originated from butylene oxide, and the units designated by the index ‘i’ are those which have originated from styrene oxide.

[0130] The indices ‘a to d’ and ‘e to i’ may be natural whole numbers, or weight averages. The indices are preferably weight averages.

[0131] A more thorough disclosure of the adjuvant (C) is provided at least in U.S. Pat. No. 8,580,225B2.

[0132] The composition according to any aspect of the present invention may comprise any one of the adjuvants (A), (B) or (C). In one example, the composition may comprise a mixture of adjuvants such as (A) and (B), (A) and (C), (B) and (C) or (A), (B) and (C). In another example, the composition according to any aspect of the present invention may comprise more than one adjuvant (A) or more than one adjuvant (B) or more than one adjuvant (C).

[0133] The composition according to any aspect of the present invention may further comprise an emulsifier. The emulsifier in the mixture according to any aspect of the present invention may be different from the adjuvant. The emulsifier may be selected from the group consisting of fatty acid esters of polyhydric alcohols and their polyalkylene glycol derivatives, polyglycol derivatives of fatty acids and fatty alcohols, sorbitan fatty acid esters, ethoxylated and/or propoxylated sorbitan fatty acid esters, propoxylated sorbitan fatty acid esters, alkylphenol ethoxylates, propoxylates, alkylphenol ethoxylates, aminoxylated oxides, amine oxides, propoxylated amine oxides, aminoxylated amine oxides, aminoxylated propylene oxides, acetylenediol surfactants, ethoxylated and/or propoxylated acetylenediols, silicone surfactants and mixtures thereof. In particular, the emulsifier is selected from the group consisting of sorbitan fatty acid esters and ethoxylated sorbitan fatty acid esters. More in particular, the emulsifier is an ethoxylated sorbitan fatty acid ester or mixtures thereof.

[0134] The acyloxy radicals of the sorbitan fatty acid ester or ethoxylated sorbitan fatty acid ester have 4 to 40, in particular 8 to 22, more in particular 10 to 18 carbon atoms and/or that the sorbitan fatty acid ester or ethoxylated sorbitan fatty acid ester has 0 to 40, particularly 10 to 30, more particularly 15 to 25 oxyethylene groups. The fatty acids or fatty acid residues of the sorbitan fatty acid esters are particularly defined like the fatty acids or fatty acid residues of the polyglycerol esters. The acyl radicals (also referred to as alkanoyl radicals) are particularly derived from fatty acid mixtures containing oleic acid, stearic acid, palmitic acid and gamma-linolenic acid, said fatty acids particularly making up at least 85% by weight in the fatty acid mixture. Ethoxylated sorbitan fatty acid esters are particularly used, the mass fraction of oleic acid acyl residues being at least 75%, particularly 85%, more particularly 95%, based on the mass of all acyl residues.

[0135] The emulsifier according to any aspect of the present invention has an HLB value of greater than or equal to 9, particularly greater than or equal to 10, more particularly greater than or equal to 11. The HLB value may be a maximum of 16, more particularly a maximum of 15, even more particularly a maximum of 13. In particular, the emulsifier has an HLB value of 9 to 16, particularly 10 to 15, more particularly 11 to 13. The HLB value is determined as described above. The HLB value of the sorbitan fatty acid esters and/or ethoxylated sorbitan fatty acid esters is particularly determined as for the polyglycerol esters. The molar mass of the lipophilic part of the molecule results from the arithmetic mean of the sum of the molar masses of all radicals R′″ present in the molecule as part of the acyl radicals R′″—(CO)—. The radicals R′″ are preferably as defined for the polyglycerol esters. The radical R′″ as part of an acyl radical R′″—(CO)— of the sorbitan fatty acid ester or ethoxylated sorbitan fatty acid ester is particularly selected from the group consisting of monovalent aliphatic, saturated or unsaturated hydrocarbon radicals with 3 to 39, preferably 7 to 21, particularly 9 to 17 carbon atoms. The calculation of the molar mass of the entire molecule is carried out as defined above. In particular, the emulsifier is polyethylene glycol-20-sorbitan trioleate. The number 20 indicates the average number of ethylene oxide units in the polyethylene glycol residue.

[0136] The HLB value of the polyglycerol ester and of the emulsifier are matched to one another. The polyglycerol ester has an HLB value of less than or equal to 8, particularly less than or equal to 7, more particularly less than or equal to 6.5, and the at least one emulsifier has an HLB value of greater than or equal to 9, particularly greater than or equal to 10, in particular greater than or equal to 11. The at least one polyglycerol ester has an HLB value of 0.5 to 8, particularly from 1 to 7, more particularly from 2 to 6.5 and the at least one emulsifier has an HLB value of 9 to 16, particularly from 10 to 15, more particularly from 11 to 13. In particular, the emulsifier is polyethylene glycol 20 sorbitan trioleate.

[0137] According to a further aspect of the present invention, there is provided a composition comprising a culture medium of an isolated endophyte, and the endophyte, wherein the endophyte is a strain of Rhizobium metallidurans with Accession Number DSM 34351

[0138] The strains and compositions according to any aspect of the present invention can be obtained by culturing the strains of Rhizobium metallidurans according to methods well known in the art, including by using the appropriate media. Conventional large-scale microbial culture processes include submerged fermentation, solid state fermentation, or liquid surface culture. The endophyte may be cultured under aerobic or anaerobic conditions and may be cultured in a bioreactor. The endophytes, and metabolites in culture media resulting from culturing may be used directly or concentrated by conventional industrial methods, such as centrifugation, tangential-flow filtration, depth filtration, and evaporation. The concentrated fermentation broth may be washed, for example via a diafiltration process, to remove residual fermentation broth and metabolites.

[0139] The fermentation broth or broth concentrate can be dried with or without the addition of carriers using conventional drying processes or methods such as spray drying, freeze drying, tray drying, fluidized-bed drying, drum drying, or evaporation. The resulting dry products may be further processed, such as by milling or granulation, to achieve a specific particle size or physical format. Carriers may also be added post-drying. In particular, the preparation of the strains is a supernatant of the fermentation broth. In one example, the composition according to any aspect of the present invention may be prepared according to the method provided in EP21198571 or EP21202623 wherein the endophyte according to any aspect of the present invention is first spray-dried and then brought into contact with at least one adjuvant. In particular, the adjuvant may be (A), (B) or (C) according to any aspect of the present invention. More in particular, the adjuvant is (A), a polyglycerol ester with general formula (I). Even more in particular, the polyglycerol ester is combined with at least one emulsifier according to any aspect of the present invention.

[0140] According to a further aspect of the present invention, there is provided a plant or part thereof infected with one or more endophytes according to any aspect of the present invention. In particular, the plant or part thereof infected with the endophyte may produce a bioprotectant compound. In particular, the plant or part thereof includes an endophyte-free host plant or part thereof stably infected with said endophyte.

[0141] Any plant or part thereof may be inoculated with the endophyte according to any aspect of the present invention. In particular, the plant inoculated with the endophyte may be a grass or non-grass plant suitable for agriculture, specifically a forage, turf, or bioenergy grass, or a grain crop or industrial crop. More in particular, the grain crop or industrial crop species may be selected from the group consisting of wheat, barley, oats, corn/maize, any grain legumes such as chickpeas, triticale, fava beans, lupins, field peas, canola, cereal rye, vetch, lentils, millet/panicum, safflower, linseed, sorghum, sunflower, maize, canola, mungbeans, soybeans, oilseed crops, tomato and cotton.

[0142] The endophyte according to any aspect of the present invention may be transferred through seed from one plant generation to the next. The endophyte may then spread or locate to other tissues as the plant grows, i.e., to roots. Alternatively, or in addition, the endophyte may be recruited to the plant root, e.g. from soil, and spread or locate to other tissues. According to a further aspect of the present invention, there is provided a plant, plant seed or other plant part derived from a plant or part thereof according to any aspect of the present invention. The plant, plant seed or other plant part may produce a bioprotectant compound.

[0143] The endophyte-infected plant or part thereof may be cultivated by known techniques. The person skilled in the art may readily determine appropriate conditions depending on the plant or part thereof to be cultivated.

[0144] According to another aspect of the present invention, there is provided a method of producing a composition for bioprotection and/or biostimulant, the method comprising combining:
[0145] an isolated endophyte, wherein the endophyte is a strain of Rhizobium metallidurans, and
[0146] an adjuvant, wherein the Rhizobium metallidurans strain has Accession Number DSM34351.

[0147] According to yet another aspect of the present invention, there is provided a method of providing bioprotection to a plant or part thereof, the method comprising contacting the composition according to any aspect of the present invention to the plant or part thereof.

[0148] The part thereof of the plant may be, for example, a seed. In one example, the composition according to any aspect of the present invention is introduced to the leaf, roots or the seeds of the plant. In particular, the composition according to any aspect of the present invention is introduced to the leaf of the plant. Applying the endophytes to the foliage allows the user to treat the growing or adult plant at several distinct times after sowing (if needed). In contrast, only a single application is possible during soil application (prior to seeding) or seed application (during seed treatment). Further, foliar application of Rhizobium metallidurans allows for reduced use of the microbial agent because higher CFU loss (several log levels) can be expected within a short period of time (lower stability of Gram-negative organisms on the seed or in the soil) when the seed or soil is inoculated.

[0149] According to yet another aspect of the present invention, there is provided a use of the composition according to any aspect of the present invention to provide bioprotection to a plant or part thereof.

### EXAMPLES

[0150] The foregoing describes preferred embodiments, which, as will be understood by those skilled in the art, may be subject to variations or modifications in design, construction or operation without departing from the scope of the claims. These variations, for instance, are intended to be covered by the scope of the claims.

### Example 1

### Strain Collection

[0151] For the collection of Rhizobium metallidurans strain with Accession Number DSM34351, different plants were collected from different sites. The sites were selected based on their distinctive habitats. A list of type of sites and plants that were used to collect Rhizobium metallidurans DSM34351 is provided in Table 1.

TABLE 1
List of sites and plants used to collect
Rhizobium metallidurans DSM34351

| sites | plant (crop) species |
|---|---|
| heavy metal vegetation | Minuartia verna, |
| | Armeria maritima |
| | subsp. Halleri, Silene |
| | vulgaris |
| inland sand dunes | Festuca ovina |
| Elbe floodplains, unfertilized for 20 years | mixed vegetation |
| chernozem (fertile loess area) | wheat, maize |
| Luvisol (fertile Loess area) | wheat |
| Elbe floodplains, unfertilized for 20 years | mixed vegetation |
| “Gäuboden” (fertile loess area) | wheat, maize |

[0152] A trowel or small shovel was used to gently excavate the soil around individual plants, and to lift the roots with minimal disturbance. The removal of root parts was carried out gently and without damaging the entire root system. Similarly, leaf material was harvested from individual plants without causing damage to the plants. Plant material was placed into separate plastic bag, and the bags were then carefully packed into insulated and chilled transport bags. After field collection, plant material was chilled in a refrigerator at 5° C. till further use.

[0153] The leaves and roots of each plant were washed separately under slow running tap water for 15 minutes in sterile distilled water to remove adhering soil particles and the majority of microbial surface epiphytes as a part of pre-treatment. Then the samples were rinsed three times for one minute each time with sterile distilled water in the laminar air flow cabinet.

[0154] Roots and leaves were cut into sections. The plant material was put in petri dishes, soaked in distilled water and drained. It was rinsed in 70% ethanol for 30 seconds and then sterilized with 3% sodium hypochlorite for 3 minutes for roots and for 5 minutes for leaves. The tissue was then washed ten times with sterile water. Validation of the surface sterilization procedure was done by culturing aliquots of water from the last rinsing onto nutrient media.

[0155] After proper drying of surface sterilized plant material in the laminar air flow cabinet, roots and leaves were cut into pieces 2-3 cm long. The external portion of the leaves approximately 0.5 cm from the margin was removed with a sterile blade. Each piece of both roots and leaves were placed on nutrient agar medium and supplemented with 100 mg L-1 of cycloheximide to inhibit possible fungal development. Plates with plant tissues were sealed using parafilm tape and incubated at 28±2° C. in order to recover the maximum possible colonies of bacterial endophytes. After 48 hours, morphologically different bacterial colonies were selected from root tips and leaf segments and after fourfold serial dilution repeatedly streaked in order to achieve enriched bacterial isolates. In order to obtain pure cultures enriched cultures were streaked out on individual 50% TS agar plates and incubated for 2-3 days at 30° C.

[0156] Colony morphology was investigated by eye to examine purity of the cultures. Colonies that appeared different were isolated and again streaked on separate 50% TS agar plates for a new cultivation. That way, mixed cultures were divided into monoseptic isolates. The pureness was confirmed by microscopic analysis and subsequent alignments of 16S sequences with corresponding sequences from the NCBI rRNA/ITS databases using “blastn”. The latter procedure was provided as a service by VERMICON, (Hallbergmoos, Germany).

[0157] Cell material from these re-plate cultures were resuspended in 50% glycerol solution as done with the primary cell material and stored at −80° C. To test re-vitalizing, new cultures were inoculated from these cryo-stocks. A growing culture was labelled “pure” and “cryo-saved”. For genome sequencing, strains of particular interest were grown in liquid culture, spun down and resuspended in 70% ethanol. About 1×10⁸ cells of those strains were sent to LGC Biomics (Berlin, Germany) for whole genome sequencing. It was confirmed to be a novel strain. This strain is Rhizobium metallidurans DSM34351.

### Example 2

### Efficacy Analysis

[0158] To determine the efficacy of nitrogen fixation of Rhizobium metallidurans DSM34351 as an endophytic biostimulant, untreated maize seeds (Zea mays, variant LG 31.224) were planted in poor sandy soil (Oxisol) with little organic matter (important that N-content is low, so that the effect of free-living N fixing bacteria becomes visible).

[0159] Five seeds were planted per pot which further have been thinned out to three plants after germination in order to avoid minor number of replicates. Fertilizer dose rate was calculated on basis of 1.000.000 kg soil/ha. Fertilization was conducted with phosphate, potassium and magnesium sulfate (25 kg P/ha, 50 kg K/ha and 15 kg Mg/ha, respectively). Fertilization with Nitrogen was performed with DEMOGRAN® 45 (Domo, Germany) that contains water soluble 21% N and 24% S; (24 and 48 kg N/ha). 2 L pots were used and filled with 2 kg of sandy soil.

[0160] At leaf stage six (about 2 weeks after planting) Rhizobium metallidurans DSM34351 was applied to the leaves in combination with an adjuvant. In the process, 1 mL of spray volume was applied to the leaves of the young maize plant. The mixture contained 300.000 CFU of Rhizobium metallidurans DSM34351 and 0.1% of S301® (Evonik Industries, Germany) as adjuvant for surface wetting as well as stomata flooding. S301® has the formula of adjuvant (B) according to any aspect of the present invention. In particular, S301® has the formula

[chemical structure]

[0161] 1 mL spray to the leaves of the pot corresponded to about 400 L spray per ha which resembled the standard application rate for field application. Maize plants were grown at temperatures between 2° and 25° C. with regular irrigation. Eight weeks after treatment (8 WAT) pictures were recorded (FIGS. 1 and 2) and dry mass of roots (FIG. 4) and shoots (FIG. 3) were determined.

[0162] It was shown that the efficacy of Rhizobium metallidurans DSM34351 in combination with adjuvant S301® was good.

[0163] Further, compounds with other microorganisms such as a biofertilizer Kreotec (Biofa) with Bacillus velezensis, Azospirillum brasilense and Herbaspirillum seropedicae, biofertilizer Utrisha™-N (Corteva, Inc, USA) with Methylobacterium symbioticum SB23 and Blue-N(Corteva, Inc, USA) with Methylobacterium symbioticum were used for comparative studies. These comparative products also contained microorganisms that were able to fix atmospheric nitrogen and were also applied to the leaf.

[0164] These comparative trials showed that the use of Rhizobium metallidurans in combination with the adjuvant led to a better growth of the plant under N-limited conditions than when using Utrisha™-N, Blue-N or Kreotec.

### Example 3

Investigate the Effect of Different Mineral N-Fertilizing Doses on Efficacy of N-Fixing Bacterial Endophytes Rhizobium metallidurans DSM34351

[0165] The general objective of example 3 was to find out how much N the bacterial endophyte Rhizobium metallidurans DSM34351 can fix under field conditions (i.e. at different mineral fertilizing doses for crop selectivity and on yields (grain & shoots) under field conditions). When seed was treated, bacterial endophytes by wet seed treatment method was carried out. When foliar was applied, bacterial endophytes at 5-6 leaf stage was applied.

### Corn Seed Treatment

[0166] 100,000 grains are planted, 1,000,000 CFU (bacterial units) are applied per seed. At 100,000 grains per ha: 1×10¹¹ CFU/ha

[0167] The individual bacterial suspensions each have 2.5×10⁸ CFU/mL, so 400 mL of experimental product is required per 100 000 grains. This results in 4 mL of experimental product (with 2.5×10⁸ CFU) per 1000 grains. A mix of 4 mL of experimental product with 1 mL of PREMAX and pickle to 1000 corn kernels was made, then left to dry in the dark (e.g. open paper bag). Nothing was added for the controls.

### Foliar Treatment

[0168] 50,000 CFU (units) of experimental bacteria was added per plant. The plants were in the 5-6 leaf stage, a stage in which only about 10% or less of the area of the soil was covered with plants. With 100,000 plants/ha and 50,000 CFU, it resulted in a total of 5×10⁹ CFU/10% area of one ha—i.e. on 1 ha in 5×10¹⁰ CFU/ha. 200 mL/ha of experimental bacterial products with 2.5×10⁸ CFU/mL was sprayed—this resulted in 5×10¹⁰ CFU/ha. 10 mL of experimental product (2.5×10⁸ CFU/mL) was diluted with 90 mL of demineralized water—this yielded 100 mL of 2.5×10⁷ CFU/mL. Of these 100 mL (with 2.5×10⁷ CFU/mL), 20 mL/100 m² was applied—or 2000 mL/ha. The Water application rate (spray liquid) was 300 L/ha and BREAK-THRU® SP 133: 300 mL/ha (=0.1%) was added. All experiments were carried out in Germany.

[0169] The following experiments were carried out:

| | | | | Application | |
|---|---|---|---|---|---|
| No. | Product | N-Fertilization | | Technique | Dose |
| 1 | Control | 0 | N/ha | untreated | untreated |
| 2 | Rhizobium | 0 | N/ha | Seed | 1 × 10⁶ CFU |
| | metallidurans | | | treatment + | per seed/50,000 |
| | | | | foliar | CFU/plant |
| | | | | application | |
| | | | | (1 x) 5-6 leaf | |
| | | | | stage | |
| 3 | Control | 90 | kg N/ha | untreated | untreatedmLmL |
| 4 | Rhizobium | 90 | kg N/ha | Seed | 1 × 10⁶ CFU |
| | metallidurans | | | treatment + | per seed/50,000 |
| | | | | foliar | CFU/plantmLmL |
| | | | | application | |
| | | | | (1 x) 5-6 leaf | |
| | | | | stage | |
| 5 | Control | 135 | kg N/ha | untreated | untreated |
| 6 | Rhizobium | 135 | kg N/ha | Seed | 1 × 10⁶ CFU |
| | metallidurans | | | treatment + | per seed/50,000 |
| | | | | foliar | CFU/plant |
| | | | | application | |
| | | | | (1 x) 5-6 leaf | |
| | | | | stage | |
| 7 | Control | 180 | kg N/ha | untreated | untreated |

[0170] The results are provided below in Table 2 and FIG. 5. The results show, that total yield increases, when the biostimulant (i.e. Rhizobium metallidurans) was applied in addition to the synthetic fertilizer.

TABLE 2
Results of Example 3

| | | Yield |
|---|---|---|
| No. | Experiment | [dt/ha] |
| 1 | untreated | 117.2 |
| 2 | Rhizobium metallidurans + BREAK-THRU ® SP133 | 117.6 |
| 3 | 90 kg/ha N | 128.5 |
| 4 | 90 kg/ha N + Rhizobium metallidurans + | 135.3 |
| | BREAK-THRU ® SP133 | |
| 5 | 135 kg/ha N | 145.9 |
| 6 | 135 kg/ha N + Rhizobium metallidurans + | 148.7 |
| | BREAK-THRU ® SP133 | |
| 7 | 180 kg/ha N | 158.2 |

1. A composition comprising:
an isolated endophyte, wherein the endophyte is a strain of Rhizobium metallidurans, and
an adjuvant, wherein the Rhizobium metallidurans strain has Accession Number DSM34351.

2. The composition according to claim 1, wherein the adjuvant is selected from the group consisting of (A), (B) and (C):
(A) a polyglycerol ester with a general formula (I) of, [chemical structure]
wherein, M is [C₃H₅(OR″)₂O_{1/2}],
D is [C₃H₅(OR″)₁O_{2/2}],
T is [C₃H₅O_{3/2}],
j=1 to 10, preferably 2 to 3, more preferably 2;
k=0 to 10, preferably greater than 0 to 5, more preferably 1 to 3;
l=0 to 3, preferably 0 to 1, more preferably 0;
wherein, the sum total of j+k+l is 1 to 20, preferably 2 to 4, more preferably 3
wherein the radicals R″ are each independently selected from the group consisting of acyl radicals R′—C(═O)— and H, with the proviso that at least one radical R″ is not equal to H;
wherein the radicals R′ are each independently selected from the group consisting of monovalent aliphatic, saturated or unsaturated hydrocarbon radicals with 3 to 39, preferably 7 to 21 more preferably with 9 to 17 carbon atoms;
(B) polyether-modified siloxanes of formula (II) [chemical structure]
wherein, M¹ is P¹₃SiO_{1/2},
D¹ is P¹₂SiO_{2/2}, D′ is P¹P²SiO_{2/2},
o is 2, p is between 0 and 0.1, q is between 1.0 and 1.15,
P¹ are independently hydrocarbyl having 1 to 8 carbon atoms,
P² are independently a polyether radical of the formula (III) [chemical structure]
where
m is from 3.4 to 11.0, n is from 2.5 to 8.0,
and with the provisos that
m/n is from 1.9 to 2.8,
P³ are independently divalent hydrocarbyl radicals having 2 to 8 carbon atoms,
P⁵ is hydrogen; and/or
(C) organomodified polysiloxane of formula (IV) [chemical structure]
where a+b+c+d+2=20 to 210,
a is 15 to 205, b is 1 to 12, c is 1 to 12, d is 1 to 12,
the R radicals are each independently identical or different, aliphatic or aromatic hydrocarbyl radicals having 1 to 10 carbon atoms,
the R4 radicals are each independently identical or different R, R1, R2 or R3 radicals,
the R1, R2 and R3 radicals are each independently different polyether radicals of general formula (V) [chemical structure]
where
e is 3 to 11, f is 6 to 30, g is 0 to 15, h is 0 to 5, i is 0 to 5, and
R5 are independently the same or different and are each a methyl, acetyl or hydrogen radical.

3. The composition according to either claim 1, further comprising at least one emulsifier.

4. The composition according to claim 3, wherein the emulsifier is selected from the group consisting of sorbitan fatty acid esters, ethoxylated sorbitan fatty acid esters and mixtures thereof.

5. A substantially purified or isolated endophyte, wherein the endophyte is a strain of Rhizobium metallidurans which provides bioprotection and/or biostimulant phenotypes to plants into which the endophyte is introduced, wherein the endophyte Rhizobium metallidurans strain has Accession Number DSM34351.

6. The endophyte according to claim 5, wherein the bioprotection and/or biostimulant phenotype includes nitrogen fixation in the plant into which the endophyte is introduced.

7. A biostimulant comprising an isolated endophyte, wherein the endophyte is a strain of Rhizobium metallidurans with Accession Number DSM34351.

8. The biostimulant according to claim 7, further comprising at least one adjuvant selected from the group consisting of (A), (B) and (C):
(A) a polyglycerol ester with a general formula (I) of, [chemical structure]
wherein, M is [C₃H₅(OR″)₂O_{1/2}],
D is [C₃H₅(OR″)₁O_{2/2}],
T is [C₃H₅O_{3/2}],
j=1 to 10, preferably 2 to 3, more preferably 2;
k=0 to 10, preferably greater than 0 to 5, more preferably 1 to 3;
l=0 to 3, preferably 0 to 1, more preferably 0;
wherein, the sum total of j+k+l is 1 to 20, preferably 2 to 4, more preferably 3
wherein the radicals R″ are each independently selected from the group consisting of acyl radicals R′—C(═O)— and H, with the proviso that at least one radical R″ is not equal to H;
wherein the radicals R′ are each independently selected from the group consisting of monovalent aliphatic, saturated or unsaturated hydrocarbon radicals with 3 to 39, preferably 7 to 21 more preferably with 9 to 17 carbon atoms;
(B) polyether-modified siloxanes of formula (II) [chemical structure]
wherein, M¹ is P¹₃SiO_{1/2},
D¹ is P¹₂SiO_{2/2}, D′ is P¹P²SiO_{2/2},
o is 2, p is between 0 and 0.1, q is between 1.0 and 1.15,
P¹ are independently hydrocarbyl having 1 to 8 carbon atoms,
P² are independently a polyether radical of the formula (III) [chemical structure]
where
m is from 3.4 to 11.0, n is from 2.5 to 8.0,
and with the provisos that
m/n is from 1.9 to 2.8,
P³ are independently divalent hydrocarbyl radicals having 2 to 8 carbon atoms,
P⁵ is hydrogen; and/or
(C) organomodified polysiloxane of formula (IV) [chemical structure]
where a+b+c+d+2=20 to 210,
a is 15 to 205, b is 1 to 12, c is 1 to 12, d is 1 to 12,
the R radicals are each independently identical or different, aliphatic or aromatic hydrocarbyl radicals having 1 to 10 carbon atoms,
the R4 radicals are each independently identical or different R, R1, R2 or R3 radicals,
the R1, R2 and R3 radicals are each independently different polyether radicals of general formula (V) [chemical structure]
where
e is 3 to 11, f is 6 to 30, g is 0 to 15, h is 0 to 5, I is 0 to 5, and
R5 are independently the same or different and are each a methyl, acetyl or hydrogen radical.

9. A composition comprising a culture medium of an isolated endophyte, wherein the endophyte is a strain of Rhizobium metallidurans with Accession Number DSM34351.

10. A method of producing a composition for bioprotection and/or biostimulant, the method comprising combining:
an isolated endophyte, wherein the endophyte is a strain of Rhizobium metallidurans, and
an adjuvant and wherein the Rhizobium metallidurans strain has Accession Number DSM34351.

11. The method according to claim 10, wherein the adjuvant is selected from the group consisting of (A), (B) or (C):
(A) a polyglycerol ester with a general formula (I) of, [chemical structure]
wherein, M is [C₃H₅(OR″)₂O_{1/2}],
D is [C₃H₅(OR″)₁O_{2/2}],
T is [C₃H₅O_{3/2}],
j=1 to 10, preferably 2 to 3, more preferably 2;
k=0 to 10, preferably greater than 0 to 5, more preferably 1 to 3;
l=0 to 3, preferably 0 to 1, more preferably 0;
wherein, the sum total of j+k+l is 1 to 20, preferably 2 to 4, more preferably 3 wherein the radicals R″ are each independently selected from the group consisting of acyl radicals R′—C(═O)— and H, with the proviso that at least one radical R″ is not equal to H;
wherein the radicals R′ are each independently selected from the group consisting of monovalent aliphatic, saturated or unsaturated hydrocarbon radicals with 3 to 39, preferably 7 to 21 more preferably with 9 to 17 carbon atoms;
(B) polyether-modified siloxanes of formula (II) [chemical structure]
wherein, M¹ is P¹₃SiO_{1/2},
D¹ is P¹₂SiO_{2/2}, D′ is P¹P²SiO_{2/2},
o is 2, p is between 0 and 0.1, q is between 1.0 and 1.15,
P¹ are independently hydrocarbyl having 1 to 8 carbon atoms,
P² are independently a polyether radical of the formula (III) [chemical structure]
where
m is from 3.4 to 11.0, n is from 2.5 to 8.0,
and with the provisos that
m/n is from 1.9 to 2.8,
P³ are independently divalent hydrocarbyl radicals having 2 to 8 carbon atoms,
P⁵ is hydrogen; and/or
(C) organomodified polysiloxane of formula (IV) [chemical structure]
where a+b+c+d+2=20 to 210,
a is 15 to 205, b is 1 to 12, c is 1 to 12, d is 1 to 12,
the R radicals are each independently identical or different, aliphatic or aromatic hydrocarbyl radicals having 1 to 10 carbon atoms,
the R4 radicals are each independently identical or different R, R1, R2 or R3 radicals,
the R1, R2 and R3 radicals are each independently different polyether radicals of general formula (V) [chemical structure]
where
e is 3 to 11, f is 6 to 30, g is 0 to 15, h is 0 to 5, i is 0 to 5, and
R5 are independently the same or different and are each a methyl, acetyl or hydrogen radical.

12. A method of providing bioprotection to a plant or part thereof, the method comprising contacting the composition according to claim 1 to the plant or part thereof.

13. Use of the composition according to claim 1 to provide bioprotection to a plant or part thereof.

The application's sequence listing, which the Patent Office published only in electronic form, follows.

SEQUENCE LISTING (99 sequences)

SEQ ID NO: 1 - DNA, 1048202 bp, Rhizobium matallidurans
  source 1..1048202: mol_type = genomic DNA
gacctttttcaaaaaatcgcagtttccgacaagaagctgtttttaaatgcgaattttcaaacagggctgttggacgccgcagatgggtcggaacagcccttccctaccctgccacatccagcccggcatcctcggatggtggcatcaacgggaccgatctgccatatagtgacgcgcaccatagaggattagatgccgtttcgctttatacacacagcagacattcacctggactcgccgctgcgctcactggcgcttcgcgacgaggcgctggccgaactgatcggcaacgccacgcgcgcggccttcgtctcgatcatcgatctctgccttgaagaacaggtcgatgcgttgatcattgccggtgatctctatgacggcgaccagacgtcgatgaagacggcgcgttttctggccgcccagatgcagcggctgaatacggctgggatcgccgtctacaaaatccggggcaaccacgacgcgctttccaggatcacccaagagctggtgctccctgacaacgtcaaggtgttcggcgggcgcgctgaagccgtggagcgcatcaaggatggtctcgatatcgcgatccacggcttgagcttcgccaagccgcaagccccggaatcgctgctgccgaaattcaaggcgccgatcgcaggcgcggtcaacatcggcatcatgcatacgagcctcgccggcgcgcaggggcatgacgtttacgcaccctgcagcgtctcggagctgcacgctaccggtttcgattactgggcgcttgggcatatccaccagcggacacaccatcagggtgcgcgcacggtgatcatgcccggcatgccgcagggccgcgacatcaacgaggccggcgccaagacggtatcactggtgacgattgccgacgacaggacgattacgatcgaggagcgcctgaccagcgtcgcccagttcgaacgggtgacagtggatctcgccgatatctcggagtggcgcggggcggcgggcgcgatcgagctggcgctcgcgcggcaacgcgaggcgaccacctcgccgcatctcgtcgcgcgcttgcggcttaccgggcagacaccgctgtcatggcggctacatcgcgacatcgatctgttgcgcaccgaggccgaggaacgcggcgagcgcattggccagacgtggatcgagaagctggagcttgccgtgcacacgcccgagggggtcggcaaggcgacggcggatcccgtcaccgagcttggccagctgatgcgcgaccgggtcatggccagcgccggctttcgtgacgagatcggcgagatggtgaaggatctgcttgccgacctgccggcggaaagccgccgatttgccggtgacgacccggcgagtttcgagcgcttcatcgatgagttgatgctcgacggcgccgacgacatcaccgcgcggatgaagacctgggatcacggagagaactgatgcgccttcgccgtctcgacctgacccgctacgggaaattcaccgatcattcgattgacttcggcgagccctccaagggcaagccggacctgcacattatctacggcctgaacgaggccggaaaatcgacgacattcgacgcctttctcgatctcctgttcgggattggcgccaccagcaactacaatttcattcatccctataattccatgcagatcggcgccctgctcgagttcgacggggccgaacacgagctggtacggctgaagcgccggaccggcagcctcgtcgacagtaacggccagccggtcaacgagggcatgctgtcggcagcactcggcgggatcggccgcgatgcctaccggacgatgttctcgctcgatgatcactccttgaaggaaggcggccaggcgatcgttcagagcaagggcgaactgggcgaactgctgttttcggcaagctcgggcctggcgggtctcaacagatcgctggtcatggcggcggacgacgcggcggccatccatcgcaagcgctcgtcaagcacgaaactcgccgagttgaagagagcgctcgagacgctgaagaacgagcgcaatgccatcgacaccttcgccgctggctattccgtgctcgcggcgacattgagccaggcgagcgcatcctacgatgcagcgggcgccgaactggctgaggcgaaacttcggcacacctatatgcagcgcattctgacgacgctaccgctgacatccgagctcgatcgccttgcggcggaattcgccgggctcggcgagctgccgcgcccgccggcggactggttctcgctgctgccgcagctttcgcgcgacgaaacccggctgcaggcgctcgtggagaccgcggaacgctccattcggcatctgttggatgagattgatggcatggtcatcgatgaacaggcattgtcgatcgcctccgccatggagacgctcgagatcggacgggcgcgctaccgggcagccgcggacgatctgccgaaacgcaagatcgcgctggccgaacaggagggaatattatcgcgattgctgttcgatctcgatcaggccggacatgaaaacccggaaaggctgctgctgtcggcgccatccgtcagcgcgatacgcgacctgatggagaagcgttcggggatagacgcggagatcgcctccgccgagcgcgagctcaagcgcgccagggatggcctaaaccgcttgagggaagatgcggccgaaatcgatggcggaacggggctggaaccagacacgcaatcacgcatcgagaccgcgctggccaggctgacggatacggagctcgtctcgcgccttgccatcgaagaacgctcctatcaccagctgcaccgcaatctcgatgagcgcgtcgcgctgctcgcaccctggtcgggcgacctggatgagctggcggccatgaaggcggcggacgcccggcagctggatatgtggcgatcgcaggcgacgtcgctcgacaggcgcgtgagcgagcatcgcgacaagcttcgcgacctcaccagtgaacgagcggcgaccttggcccggattgccgcctttgcaagcgaaggcacggtggacgacggcacggcgcaaacgcttcgcggcgcgcgtgacgcggcctggcaaagccacctcgctacgctcgacagcaccaccgcctccacattcgaacgggcgatgctccaggatgatgccgcaacagacaatcggtttgcccgcgccaaggacctcgccgaactccggcagctgacgcttgccgccgccaccggagcggccgccatcgaccggcaggaagaactgcttgcggaggcgttgggggaacaccataccctggccgataagatcggcacctacctgcccgacgccaccgaaggcggatcggatgcgctggagcggctcgcagcgctcgaaagctggatcggcaagcgaagtaccgcgctttccgcccgggacgatctgaagaaggtcggctatgaactggaggcgctccgctccgaactcggccggcatcgcgccgcgcttgaggcagctctggcagaggccggcgcgcggctcgacggcgagatgccgactagcgagctgacgcgggcggccacgagactgctcgccgacagcaggagccgggaggaggcgtgcgccagccatcggaaggcggtaagcggcctgacgcgcgatgtcgcggagcgggagcgcgagcagcaacaggctgtcctggccgcggaggggtggcgtgttgcctgggcggaggtgctttccggcacatggttcgccgacaggaccacgtccgttgccgccgtcggcgccattctgtcgacccttgcaggcttgcccggcgtcttgaaggaacgtcaggatctggctcaacgggtgtcggcgatggagcacgaccagaggcagtttcgggccgagctttcaaacatgctcggccaattggcgacggatattggttcgggcgacgtgctcgccgccgcaaatgcgctcgtcgagcgctacaacaacgccttgcgcgaccgccagcatcgcgccgacagacagacgacacttgaaacgctgcaagccgaccgacatgcgctagacgcggagcttgccattcacaacgcccgcaaggcggaactgactggctatttcggcaccgatacgctggcggctgtcggaacctacctcgacgcggcaaaggaacgcgaccggatagagcggcgcatggcggagctgcgcgagcagatcgcccagggactgcgcgtgaaaacctatgaggatggcgcacggctgttgtcggagatcgacgccgccgaggtcgagcacagcgcgctgagcctcgccgcccggatcgaggatctgacggagcgtgcgcgcgagctttacgcggacatgacccgcgcccaagacaagctcgatgccgtgggtggagacgacgccgttgcccgcatcgaagcgaaacggcgtacattgctgcttgaaatcgaggcgctcgccatccgctacctcacattgcgaaccggcacgatggcggccgaacaggcgctgcacctctaccgcgacaagcacagaagctcgatgatgaaccgcgcttcacaagcgtttcagacgatcaccggcggcaactattcgggccttgccgcgcaacccgacaaggataaggagatcctgatcggcgtatcgcgcgacggcggatcgaagcttgccgattccatgtcgacggggacgcagttccagctctatctggcgctcaggctggcgggatacgaggagttcgcggccgttcggccggccgtgcccttcgtcgccgacgatatcatggaaagcttcgacaacccgcgctccgaagaggtgttccgcctgcttggcgagatggcgaaggtcggtcaggtcatttatctcacgcaccatctgcatctgtgcgagattgccaaatccgtcgtcccccaggtgaaaattcatcagctgggctaggcgtcgagcatgcggaagtagcgctctcgacgtcagaaggtcttgacggcctccgcgctttcgattgccgcgacgtcgcccggccgatcgcgcttgacgtattcattgaccagcggcgtggcgacggcgggattgctgaagctccatattccggaacgcacgccctccatgacggtcgcgtagaccgcgagatcgatcgcctgccgcacggcgagctgcgtcggctcgttgcgggtgtagccggcctcgatctgcagcagcttgtccgttgacacgaacttgtagacattggcgttcaccccggccgaatagacggtcttcgtcgtcgtgacgctcaacagcacttcgcccgtctgcaccgatacgatgcggacgccgacggtgacgacatcgcggcgatattgggcatcggcgccaatgccgaggaaattcgctccgacgccgccggtgatggtgttggcgtcataggtcaggatgccaccttgaacgatcagcccggcgaagcggatgggcggcaatgtcttcatcgcgtccatcgaatattcctgccgcgtggcgcggatcagctggcgctcctgcaacaaatcgttcaggccggtgcgctcgaccacggtaaaccagttgccgccgcccgcgcgcttcagcgcatcgatgatcagtccggagccaccctgggtcacggcgcgagagaacacggcgacattgtcgttcggctcgttcttgccggtgagatcgggaaactggtaaacggcgatatcgaccttcttggccggcggcggaaggttttcgagattggtgcgcgtcggcgacggcggtgtcaccaccggcggctgctgcaatggctccttcgtggcggtcgtctccacgcagcccgtaagcagcaaggcactgaggatagcgagaactcgaaccattttcatacgctgtacttccacgagacgttgagacgctttacggggtcgcaggcacggtcacgttggtgatcgtcgagccgtcattgatggtgatctgaatttcgccgccgacgcgcacgaacgaaatcgtcgttcccgccagcgtgtagcttccgcttgtttgcgcattcgcgccgaacagggattcggtgatctggtttgccagcgaggcatagagctggctggtcagctggttggcgaacatctgcccgggggtcagcgccgaggggcccgatatcgcggacttgccgctgtccttgaactggttctgtgcatcggcttgcgacatcatccagttgccgttcagcgggctgccgccaaaggccggattgacgggcgtatagaccagactgccggcctgcgccgcgcaggccgagagcagaaccgcaaggccacccactacacttctcagacgctgtgccatcgcccttacctctggctgaattgctggatcgtgatcgtctgtccgctgaccgtcgaggacaggccgtagctgaggccgttgcccatctgcgtctgcaagaccgtgttgttgcttcctgtcagcgcaacgctggcactgttgttgttgccgacctgcaggctgtcgaccgtgttcgcgtcgcccgtcaccgagtaggacacccagttgccatcgccgatctgcgtttcggaaatccggttcgcggcaccgttttgagtgatcgaggcggtgttgttcgatccggtctgctcgatcgacgcgacattgccgccgccgctcgccgtcgccgtgctggtggccggaggtgccagcagatagtttccgagatcggtataggccgatcccgcgtcctgcgcggaagccgtggcgcccaccagtgcgagaagcaccccggctaccgccggcgcgaattgcaaggctgatctatttgccattggagacctcgtcgaaaacgcattcgaactcggcgcccagcgcatcgccgctcagctgcacgcgaacgcgcgtgcccctggcgtaatcgagtttcgattcaccgacgaaaacgggatcgctggtcgggatactgaaggagccggattgcgtgacattggaattgccgctccggccctccttgagaacctcaaagcgatatttgccgaaagccggcacgggactgacgatccgccccctcaggcggattgcgctcttcgagcgcgtggcatcgaccgagcacgaaattgctgggggagaccccatatccattccacccattccacccctcctgtggaagtggggcggctgaaccgccccactgtatgcgatgcggttagttctggacaacggtggcgacgtggccgctaccggtctgcgaggtcaccgagacgttgccgtagttcgtctggacgaccgacaccaggttgctcgtgccattctgcgcgtagttcgcatagttgttggtgccgctttggttgatcagggctgtgttttcctgaccagcttcgccgccgtactgtgaaccgatgctcttgttcaagttgccgctctgcgtgatcgtcgcgaccgcgtagttgccctgattgctcatgacatagttgttgtcgccagtctgattgatctgcgcggtcgcatagttcccggtttggctggtatagatatagttatcggatccgacctgcgaaccgttgacgacgctgtagctccccgtctgcgaattgatcagcttgttgctgttaccctgctgaacgaacggcgtgtcgaccgagctgttcgtgtccgcgagaccgatcacgttgttattgccgctctgtaccgagcttgcatagttgccggagccgatctgccagatgttcgctcccagccaatcaccgctctgtgtgatggccaggccgttgccatcaccattgccctgtaccgcgacagcgtagttaatgcttgccgacgtttggttgatggcgatattgttgttgctgccattgaccggataccaacggccggtcacgtcctgtgcccagttccccacggcctggcgcgtaaatgccagtccgccggtaccgttctgcgtgactgaggtgttgttgctgttgccgccctgcacgatgtcaaatgcgttgttgttgccagtctgatagaccccggccttgctaccgttcgacgacgaatcctgaacgatcgtgtcgtagttcggcgaattggtccatccaacattcggcttgccgttgttcgtgccgttctgctgaagctcgacatcactattgaagccggcttgagagatattagcggtattggtcgtaccggattggaagccggcaccatcgcgggagacccagttgttgttaccggtctgcgtgatcgtcaactggttatcgccggttccgctgccgttctgctgtaggaaatagttaccaccgctacctacattgttgccgctaccgctttgcgtgattgttgcgtcctggctagagtcaagctgattgagatagacagtattgctgtcagcgaaggcagacgatgcacccagaagcgccacgacagccgtagacaaaagaaggtgagttctcatttttcgtcctccaaatatgagaatttttctatgccgcttgtattcggaactgacgcaatactctcatggttgccgatttcttaataaagcacacaaatatatacgttatacaactgtaaatcgtttcaaacggggatcatccaaaaggcgtacataatctgtcgctaatatctcaacatccgcgttgaacatttgccgggactagtgttgtctgaacgcaaaacgcggaactgacggggaggagcgatcgatgtccgtgcgtaacgctctcatggcatgcgtgatcttgcccgccgttttctcgacaccagctatcgcgcaacagaccgcttcgacggcgccggcggcggggacgctgtgtgacgccgattgcatccgctccaattccgaaacggtcgctcaaatgtgcgctcgtccgatcgaggcccaagcgccgatcgatttcgaatgggtaaaccgcccctatgccagcttcttccaggaggccgatccgcccgagggacaatcctccgttgttatttatcgaggagactcgatccgcttcgtgacgccgaagaaggagtggatcagaatgacgttcgagtgcgcctatgatgccaacgccaagaagctggtcggcgtgcgcttgaaaccggggcggctcggtcagccgcagccggtgatcgcttccgccgcgcccgcaccgccttcatcgaaggcggcgcagatgaagcaaccgagccagatcgacggcgcggccttgggcgccgccatccagcgagccgtaaggcgacccaagccggcggcgaagccgacgcggacgatgaacatcggcgagccgagcggcatcgaggtcgagcagatggcgatcgctcccgattgagtgcgcgcgaacctcacactctgcccggggcgcgggcgaaccgccctccatcacaagcgtgatcgtcgatatcaacatcaccctgctgacggcacagcaagcgccacccggcttgacctcaagccttctgcgtcccaggtatccatgagcccggccgaatggccttgggcgcagcaggagatagcacgatgcagattacctaccacgtcggacagcacgatggtggctatggataccgccttggcgatgtctggtccgaaacatttccgacacatgatgccgccctttccgccgccaaggccgccgcgagccgtcagcacgtcgaaggccgcgatgcggagatccagtaccagaccgccgatggctcttggcacatggaacatgccagcggcggagaccggcccgataccgaggtgattgacgaccgctgacgggtgggcgacctttcaagagaatctcaccgacacaggaacacatgatggccacgacaccacgacgccccgtcaatgcaatagacgcggcggaagccttgttcaaacccgccaagaaacagccggcgccggcggtcgagcggccggctatcccgaatgcaaaggaaatggtgtcgatcaagatcgacagcgacgtgctggccttcttccaggaagacggccccggctggcaggagcgtatcaacgactgcctgcgtgccgcgatgaaggaaggccgctgagatccgaacaagcggcagcgcgccgtcctggtgctagccgagatgcttcgcagggggctcacggcgatccgtgctgcacggcaaactcaggctagcgcccgccttcaacgagggaaattgggcaaacatatgacgtgtacgtaaaaggaaatatacgacatcgaatctcccgagttagggacactttcttatcgaaacgttccgatccgtaacgatcggaaccgatagccaccgcctcgacattgacagcaaaagcccggcgctcgaaagccggggcatatgtcgcagagcctcctgaccctagaccaacaacaacacgtcaccggtcgatggctcgccccaagcgggccattttcgcttttgctgcgtgccgcacggcgcctcacgataaaataaccaattggtgaattgtttacttgaacggccggttcgaatcgtcaaaggtaagcacgctaaccaatcccatcatcgatttgccgtcccttgcggacccgcgccgatacaattctattttggaatgaaaccgtgagcagcgatgcgttgaaccgtgtagcgaagccgtcggcttcgatggcaaaggcgactgcggcaggctggggcaaaggcctctccacattggtccgcatcaccgtcatggccttgcgccacccatggcagtccggccttgcgatcggcgccaccctgattgcctcttcattccagttgatgatcccgcgcctgctcgggagcgcggtggatcacacccaggcggtcgtcgaaggcggcgctgccggacttgtcgcccaagatgcactgctgacgaccgccttgttgttgctcggcgccagcgtgatgcgcggcgtcttcaccatggtacagaactactacagcgaaagcgtcggccaccacatgggctacgagcttcgcatcgcctgctacgaaaagatccagcggctctccttcagcttccacgacagcgtgcactcgggcgacctgatcaccatcggcctcctcgatctggaaggcgtgcgcatgtatttctcgacggcgctggtgcgcatggtgctgctgaccatgctcatcggcatcggcgcctacatgctgctttcgaccgacgtggtgctcggccttctggcattgagcttcgttcctttcgtcggctggcgctcttcggtgacgcagctgcggttgcgcgcaacatggctggtgctgcaggagcggctttcggtcctgacccgcatcatggaagaaaacctcggcggcattcgcgtcgtccgcgccttcgcgtcccatgcctacgagatgtccaagttcgaagcggcgtcgaagagcgcgctggaactagcgcatcaacgcgtcggcatccgcgtcaccaacaccagcgccatgacattttcctttttcgccgccatgggcctcgtgctctgggtcggtggcggcaaggtgatatcgggcgagatcaccgtgggcacgcttgcatccttcctcaccttcatgaccatcctgcagatgccggtgcgccagctcggcctgatggtcaacgccttcgcccgtgcctcgacctgcggcacgcggctgttcgagcttctcgatctcgagatcgccgttcgcgatgcgccggatgccagggagttgaagatcaccgagggcacgcttcgcttcgaaaatgtgagcttcagctatccgagcacaccagcacagcaggcgctgcgggtcatctccttcgaggccaagcgtggagagacgatcggtatcgtcggccctcccggcagcggaaagtcgaccctcgcgcatctcatcccccgcttctacgatgtgaccggcggccgcgtcacaatcgacggccaggatgtccgaaaggccacgcttcagtcgctgcgccgctccgtcgccatcgtgcagcaggattccttcctgttcacgacatcgatcgagaacaacatcgcctatggcgacccatgggcgaaggaaagccgcatcgccggcgccagcgaaagcgcgcagctgcacaattacgtgctcggcctgccgaccggctacgacaccgtcgttggcgagcgcggtgtgtcgctttccggcggccagcgccagcgcctgtcgatcgcccgcgccctgatgctgaagcccgccgtcatggtctttgacgattccaccgccgcgatcgatgccgcgaccgagcagcgcatccgctccgccatgcgcaaatacgccgccgaccgggtcacgatcatcgtggcccatcggctgagctcgctgatgcatgcggaccagatattgttcatcgaagacggcgagatcgtcgagcgcggcacacacgaggagctgctggccacgagcgggcgttacaaggcgctttacgatctgcaggtgcgtcccggcgacgaagccgtgagcgcctagggaggaaaaatggccgaggaaatggaaaccgaacgctccgacgttcgcgaggatggacgccggccgccacgcgcggtcgtcggatcgcagcgcgtcgaggaggagatgttcggcaaggcctttgatggcaacgtcatcaaacggatatgggccttcgtccggccgtatcggcgcgacgtcgtgctctcggtctgcgcggtgctgacgtttacgctgatgcaattgatgatcccgctgattatccgctacgcgatcgaccacggcatgcagcaggatggcagccattcggcactgacatgggccgtcgtggtcttcctcgtcgcgatcgtcatcaattacggggcgagctacgcacaggagacgcttgtcggcggcgtggccgaaaacgtgctcttcgacattcgccggcagatgttctcccatctgcagcgcgtctcgctttccttcatggacaagaccgaagtcggccgcctgatgtcgcgcctacagggcgacgtcaactcgatgcaggaattcctggaaacatccgtgctttcggtcggcgacatgacgctgcttgtcggcatcgtcggcgtcatgctctatctcgatcccaagcttggcctgctgacgctttcggttctgccgatcctgtttatcgtccgccttttctggctgccactcgcccgcaagtcgttcatggcggcacacgagaccaattcggtcgccaacggcgccttggccgaggcgatccatggcgtgcgcgccgtgcagagcatggatcggcagggtgtcaacttcacgctttacgacgacaaggcgaaggcgaacctccagacccacctcaccgcggcgcgttacgcgcaggtgatggtgccgatcgtggattcactgacgggtgtcgcgatggcgctcgtcatcgtcgtaggcggcgcccgcgtgctcaatcaggcgctcgatgtcggcgtgctcgtggcgttcctcttttatatccagcgcttcttcgacccgatccgttcgctgacactgcaatactcggtcatgcagcgcgccatggcatccggccagcgcttgaccgaggtcctcgacgtgccgatcgatatcaaggacgcagccgatgctgttgttctttccagggacatggacggctccgtcgagttccgcgacgtggtcttcgggtataacccgaagcacccggtgctcaagcatgtgagcttcaaggtcaatccgggcgaaacggtcgctcttgtcggcccgaccggctctggcaagtcgagctgcatgtcgctgatccaccgcttctatgacgtgcagcagggacaggtgctcgtcggcggccacgatgtccgcgcgctgacacaggattcgctcggcgaccagatcgccatggtgctgcaggagccgttcctcttcaccggaaccgtgttcgaaaacatccgttatcacaaacaggacgcgacgcgggagaaggtcatcgaggcagccaaggccgtcggcgcgcatgacttcatcatgcgcctgcccgagggctacgacagcatgctgggcgagcgcggcggcaatctctcgctcgggcagcgccagcttctgtcattcgcgcgcgcgctcgtggccgacgccaagatcttggtgctggacgaggcgacggcgaatatcgacagctacacggagatgttgatccagaaggcgctggtgaaattgctggagggtcgcaccggcctggtgatcgcccacaggctggccaccatccgcgaggccgaccggatcatcgttctgcagaacggcgagctggtcgaaagcggcagccaccagcaactcatggcgaaccgcaagctttacgcgcggctctacgacctcaactacgcgtcattcgacgatattccggaaacagttctggaagagacgactgcaagcggatcggcgacctaacctaatcggcgatccagatagagaaacccatttcgacacggaggatgttcaatggattatcgcaagcttggaccaagcgggacaatcgtcgcgccttattgcctgggaacgatgacattcggcgcggaggccgatgaagccacctcgcacaagatactcgacgactatttcaaatggggcggcaattttgtcgacaccgccgatgtctatagcgcaggcgtttcggaagagatcatcggccgctggctgaaggcgcggccgacggaagctcgccaggcggtgattgccacgaagggacgtttcccgatgggcaacggcccgaatgacatcgggttgtcgcggcggcatttgaacgtcgcgctcgacgattcgcttcgacgtctcggcgtcgagcatatcgatctctaccagatgcatgcatgggatgccctgacgccgatcgaggagacgctgcgtttcctcgatgatgcggtgtccagcggcaagatcggctattacggcttttccaactacctcggctggcacatcgccaaggcggccgaaatcgccaaggcgcgcggctacacccggccggtgacgctgcagccgcaatacagcctgcttgtccgcgatatcgagctggagatcgttccggcctgccaggatgcggggatgggccttctgccatggtcgcctctcggtggcggctggctgacgggcaaataccgccgcgaccagatgccgacgggcgcgacgcggctcggggaaaatccgaagcgcggcatggaatcctacgaccagcgcaacgcccaggaaaggacttgggacatcatcggcgccgtggaggaaatcgcgaagtccaagggttgcagcatggcgcaagtggcgctcgcctggaccgccgcgcggccggccgtgacatcggtcattctcggcgcccgcacgacggagcaactggcggacaacctcggtgcggccaaggtcagcctttccgacgaggagatgagccgcctcacagagatcagcgcgccgcaccccttcgattacccctatggcgttggtggtacgaaccagcgccaccgcaagctcgaaggcgggcggtaaatcatcaggcagcggcggcgtataccgccgccgccttgtcccttcagatacggacgcccgtcgcgtcgtcgaatagatgcagctgtgccggatcgatggtcacgccgatcgtctcgccgccacgggcggtgccgcggccggtttcgacgatcgtcagttccggcgtcgtcgccgccgtaatgaaggtggccgaaccggtggattcgacgacgtcgacgggaatgtcgagcgtcccctgccctgtcgcggtgatgccgacatgctctggacggatgccgacggtcaccttgcgccccggctggagttgacgattgctcgcaagcgtatgcttgaccgttccaagatcgatctcgaggctgcttccgtccccgccaacgacacctggaatgaagttcatcgccggcgagccgatgaagcccgcgacgaacttgttggcgggcgtgtcgtagagctcgagcggcttgccctgctgctcgatcacaccctcgcgcatgacgacgacgtggtcggccatggtcatcgcctcgatctggtcgtgggtgacgtaaacggaggtcgcgcccagccggtcgtgcagcgcgcggatttccttgcgcatgtgaacgcgcagtgccgcgtcgaggttcgagagcggctcgtcgaacaggaacgccttggggtggcggatgatggcccggctcatcgccacgcgctgccgctggccaccggagagttcacgcggatagcgcgtgagcaggttggaaagccccgtggttgcggcaacctctgccgcggccttcttggcctcggccttggcgacgccgcggatgcgcaggctgtaggtcaggttttcctcgaccgtcatatgcggataaagcgcataggactggaacaccatggcaacgtcgcgcttgcgcggcggcacattgttcatcagttcgccggcaatcttcagatcaccctcggagatgctttccaggcctgccagcgagcgcagcaaggtggacttgccacagcccgacggaccgacgagcgccacgaagctgcccttggcgatctcaaggttgatgttcttcagcgcatggaaggcgccataatgcttgttgacgccgctgagctcgatctgattggtcatttgagggctccagaggtgaggccggatacgatgcggcgctgcaagagaacgaagatggcgagaacgggtgtcacatacatcgtggcgtaggccatgatgttgttccactcgctggtgttcggtcccatgaaggagttgagaccgacgctggcgggctgaagctctgcttcctggatcatcgacttcgaatagacgaactcgccgaaggcctgcatgaagatcaggatcgcgctgacgaggatgccgttgcgggcaagcggcagcacgatgttgaagaaggcgccgaatcgggagttgccgtcgaccagcgctgcttcctcaagctccataggcaccgccatgaaggtggcgcgcaccaggaccacgaagaacggcatgcttttcgcggcaatcgccaggatcacggcaaagcgcggatagtcgagcaggccgaactgcgagaagcccacgaagatcggcgtgatcatcagcgatgccggcaaaacctgcagcatgaggatgaggaacaggccgatatccacccacatgtttcgatagcgcgccagcacataggcacagccgacaccgagcacggtgatcagcgccacggagccgaaggcgatgacgacggagttccagaggtagcgccccatgttccggctttcccacacataggcgtaggttccccattgcggcgaggacggccagaagctcggcgggttggcgaacatctccgagccgcttttcagcgccgtgatgtacatccagtagagcgggaagagatagattgccgccaggacgatcgcgatgaaaagcatcaggcggttgcggttggtatcgctcatccgcgcacctcatgttttgtcgaccggacatagacgatcgaggcgaacatcacgaagacgatcatgatgacggagatcgtagcgcccttgccgaagtcgtattgccggaaggacaggtcccaggcccagtattgcgtgacgttggacgaattgttcggcccgccatcggtgatggccgcgaacagatcgaactgctgcagcgtgaagatcaggccgagcgaaacgatggcgccgatggtcgagcgcatcatcggaagcgtgatcgtccagaaacgctgccaggcattggcgccgtcgagttcggccgcctcatagagatcgccagggatggaagacagcccgaccgagagcaggatcatgttgaacgacgtgccgagccagatattggcgatgacgaccgcccagagcgagaaattggggtccgagcgccagaaaatgttggagctgatcaacccgctttcgcgcaggatgaaattcaagacgccgaagtcgcccgacagcacccagttccagatcgcgccaacgacgaggccgggcatgacccaggaaacgagaaacaggccgcgcagccaggaggcgcccgggaagttcacccagaagaacagcgccaagccgaagccgatcaggaactgaccggcgatggaaccgacgacgaacagcacggtattatagatgatcggcagcgtttcgggctgcttgaacaggtcgacatagttcttgaaaccgacgaaggggcgcacgaaggtcccgaggctgaacatgtcgacctcctggaaactcatgacgatgttgtagacgagcggcaggcccgcgagcacgaacaggaagatgagcggcagggcgacaagcgtgatgtcgaaaccgcggccatcgatgatgctggaaaaaagcctcttcatggataccccttaagctccgaacggggctgcctggcgcttgcgcggaagacagcccctgccgggaggaaacggtgggatggcgcaagcgccattggggccggacaggcggagcgcatgcgcgccccgcttgccccgatatgtcactcttcgacggccttgatcttctcggctgcctgatcgagcgcatccttcggcgacatctggccggccagcgctgcctggatggcatcctggatcgccttggagatcttcggccactccggcgacgggccgcgcggctgggcatatttcagctgctcgacgaaggtcttcagcgcgtcgtccttcagcttgttgcctgtcggcgggatggcgatgtcggagcgggccggaagctggccgaacttctcatacatcgtgttgtccttcgaggcgaagaattcgagcgccttgaaggcctccgccgggtacttggaactggagaagatcgcccagttgtagtcgcccatggccgaagaccgcggcgcgccttcctgcgggaccggcaggagcgccgtgccccagtcgaacttggcgtcggtcagcatgcggtcgatttcccagggaccggatatggccatggccgcgttgccggcgttgaaggtggcggtcgaatcccactggctgcgggtcagcgtatcgggagaagcaagcttctcgtccatgatctgcttccataccgtcagtgccttgacggcaccatcagcgttgatcgtcttataggtcgcgccgcccatctgggcccagggcaggaactggaaggtgccctcctcgttcgccttggccgagaaggtcaggccatagacattcttcgaaggatcggtgagcttcttggcgtccgcgaccagttcgtcccaggtctgcggcggcttttccggatcgaggccggcggccttgaacatgtccttgttgtagtagagcgcgatcgtgttggtcgccttcggcacgccgtagagcttgccgtcccaggtggcggatttcagcggtccagggaaataattctcgggcttgatgaccgtcgacttggcgatcatgtcggtcaggtcgaggaatgccttgcgggcggcgaacatcgcatggttaggattgtcgatggcgatgatatcgggcgccttgccggtcgagaacgcgcgcatcgactcactgacgacgtcgtcgaactggatctggcggtattcgatcttgatgccgttgttctgatcgttgaattccttgatcaggttcggcgccggctgaatgtcacggtcgagcgaccagagggtcagggtgacgtcttcggccttggcggctaggccgaagagcgacacgcccgccagcgcaagcgcgccgatcattgcaaatttacggatagccatggttctcctcctttgtggttatccttgatcgtgaggccggcaattcctctttgccggccgcgatgtcctcagaccggatcgacgacgaaatcgccgccccgggcatgcttcaaatggttcagcgcatgaacctggccggtcatctcgagcgcgtcgcgatagaccggatcgtgccaaccttcaatgtcgatggatcccgaccagccggcgaggcgcagttcagaaataatgtccgtccagttgctgtcgccgaagcccggcgtgcgcatgaacacgaacttctccttaccgaagatgccatgctccttgatgacatcccagcggatcgttgcatccttgccgtgaacatggaaaatcttcgacgcccacttgcggatctgcggcagcggctcgatcagatagaccatctgatggcacggctcccattcgagaccgatattgtcgtcgggtgtctcgttgaagatcagctcccaggcatccggattgtgtgcgatattccagtcgcccgtctgccagttgccgtccatcgcgcagttttcgaaggcgatcttcacgcccttgtcggcggcgcgcttggcaagctcactccagatttccttgtagcgcggcaggctgtcggtcagcaccttgccacggacacgaccggtgaagccggcaacgcaggtggcgccgaagtggtgcgcgttgtcgatgcaatccttccagccctgaagcgtgtcgagatcgatatccgtcgtttcaagcgggttgccgaacatgccgagcgtggagatggtgatgtcacggtcgccgatcgcgtcgacgcagcgctttccgagctcggcgaggttctggccattggtcgtctgccagaagaagggttcgaagctttcgaagcccatatcggcgatctggccgatccgcttgtcggcgccgcccttcgacgcgctgaccatggttccgatgcgaatggacttggcggggttgctcacaatctcgatccttatgctgaaatttcaatacgcttgccggtcttggcgctttcgatcgcgccgaagaccatggcgaggcttctgatgttatcggaacttgccgtttccgggcgcttgcccgtcttgatggcttcgacgaagcttgcgatcacgctggcatggccatgcgtctcttcgtcatgttcaggcgcaggcacctcgaccggcgtgaagccgcggagcaggccaggctcgcttccggcggtcgcggccttgaagccctcttcgccatcccaggtcagcattcccttggagccgacgaggcgccactggctttcccagctcgtgcgctcgccttccgcgcaccacgaaccgcgataggtgaagacgacgtcatcggcgaattcgaaagtcgcggtggcggaagcgccgtgctgataccaggaacccttcggattgcgctcgacgcagtagacggcgagcggcttcttgtcggcaacgaagcgcgcggcatcgaaggtgtggatcgccatgtcgagcaaaagcacgttctgcatttcttcgcggaaaccgccgaaatgcggcgccaggaagaaatcgcaatggatgccggtgatatcgccgatcgcaccgctttcgacgaaacggcgcatgcgacggacgcccgagatgaagcggcggttctggatgatggcgtggaccttgccggtctcggcggcaagatcgatgagggccgcgccctcggcaagcgatgttgccatcggcttttcgctcagcacatggcagccggccttcagcgccgtcgacaccacgttgaagcgcgcggtcgggatgaccacgtcgaagacgatgtcggctttcgatttcgcgatgacgtcggcgaggtcagtgccgatcacggcatcgctcaaaccaaactcctcggcgagcttttcagccgccgccggattgacgtcgacgaggcccttgacctcgatttcggccgcaagagccggggtttccttgatggcgcgcaaccagcccttggacatggctccgcaaccgcagagaacggcattcaatgtcacgatttcctcccgtggacaatttctggcttccccccgaaacttgtcccgtaaacgtttacgatactaagcggaaacgtttctcgctgtcaatcccacgcgatcagacaaaaaatgctgcggaaaacatctgcaaatgcggggccttaaccttggctgcgccgcagcgcagcacgaaaaaatttcacgctattttgcgcccgcgtcccggcaggaacgcaggtgaccggatcagatttcgattcttcggttagcggatcaagatcgcgcggaagtcgttgacgttggttcccgtcggaccggtctcgaacaggtcgccgattgcagcgaagccgctgtagctatcattgccatcgagcaggcggcgcggatcaagaccggcggcgcgcaatcgctcaactgtcttcccgtcggcgaacgctcccgcattgtcttccgacccgtcgatgccatcggtatcggcggcaagcacatgcatgtcgtggccctggatcgccagcgccatggcgagcgcgaattcgccgttgcggccgccctttccgcccttgcctcggagcgtcaccgtcgtttccccaccggagaggataacgaccggcttcttgaacggtcggtctttcgctagcacttcgcgggcgatcgccgcatgcatcgaagcgacatcgcgcgattctccctcgatggaatccgacaggatggcggcttccaccccgtgcgatctggcaagcgctgccgccgcttcgagcgaaacgccagcagaggcgatcacatgatgctcgtggcgtgcgaacaccgcatcatccgggctcggcgcatcggccgccggcgtggcgagaaaatcgagcgcagcctgcggaagcggcatcttgtactgggcgataatgtcaagcgcatcgtgccgcgtcgagcgatctggaaccgtcgggccggaagcaacataggcaggattatcaccgggtatatccgacacgaccatgctgacgacgcgcgccttggtcgccgcggccagcctgccgcccttgatcgtcgagagatgcttgcgcaccacgttcatcgcggaaatcggcgcgcccgaagcgagcaggatctcgttcatggcaatctcgtcttcgagcgttagccccaacggcggagacggcagcagcgcggaccctcccccgcagatcagcgcgatgacgagatcatcctcgccaagcccgctcaccgcgtccatcagccgcttcgaagccgcgaggccggcgctgtccggcaccggatgcgaagccacaaggatctcgatgtcttgggtttcgcagccatagccatagcgcgtcaccacaacaccctcgagcgggccgtcccagacgccctcgagcgcctgcgccatctgtgccgcgcccttgccggcgccgatcaccaccgttcggcctttcggcttggctggaagataggcggtgatgcctgtcaacggatcggccgccttgacagcggcggagaagagatcttttaggaaatcgcgcggttgcatgggctggctttcgagaaaattcaactgtcgaggctgaaggcatcgctctcgcccgcaacgagctcaagcggccaaatcgtgttgcgcgcgccaccgggatagaaatccgcataggcaggcatcgtcgcgagcagtgtttcggcaagctcggcgccgagatcgcgcagcgacatcctgaaacaggtcagtgtcggctgcaggaaccgggcgcgcggctcctcgcgaaagccgatgaccgcgagatcccggccgggaacgatgcccgactcgaccatgcgccgataaagcccgatcgccatcagctcataaatcagtatgatcgcggtcggccggggatcgaggcgaatgagctcatcgcctgcttgatatccgccctgctcgctcgacttcgcgcgaatgacgagttcgggatcataggcgataccatgacgttccagcgcgctacgataggcatcgaggaagatgtagccgagattgacgtcggttgatggcacggcgatcgcgatccggcgatgccccttggccacgagccgatcgacggcgcaggccgctacgccttcgaaatcgaggtcgatccagctgtaattgccgccggacgagctgcggccgagcgcaacgaagggtatttttgccttggccaggaagtcgatgcgcttgtcgatgcgttgcgtggcggaaatgatcagtgcatccacgacacgacgcgccaccatgcgcttcagatactcctgaggatcctcgtcgttcgggcaaggcagcatgatgagatcgagcttgtggcgcgaaagcacgctttgcagaccgccggtcaggccaaggaagaagttgtcggcgttttcgaccgtttccttgctggactcgatcatcaggccgataacgttggtggtaccctgccgcaggctacggcccgattggttcgccacataaccaagctcttcggccgccgccagcacgcgcttgcgggtctcctcgttcacgtccggtttgccattcagcgcccgcgacacggtcccgatcgaaatatcgagatgcttggccagttggcgaattcccctcattccgacaatcgtcctcccagtaccgatggctcgccgaccttatgtgacacaccaaaaccgatccggaaaggaccaaggacaacgatatgtggggagcaggaaaaggcgggccgatcataggcagctttgcgccgcgtcagagacttggcggctataagcgcggctagatcgcaaaacaccgtcacggaaacagatcggcatccttcatcaacggcgcttgcgcgtccttggacgaaagggtgggcgcagcctcgatcggccaagccacgttcaccgtaggatcgttccagatgatcgcccgctcatgctgtggcgagtagaaatccgtcgtcttgtagagaaattgtgcggtctcggacagaaccacgaagccatgcgcgaagcccggcggaatgtagagctggcgcttgttgtccaccgacaggatttcgccgacccactgcccaaaagtcggcgaggatcgccgcaagtccacggaaacatcgaagacctcgccctcgaccacccgcaccagctttccctgagcctggctgatctggtagtgcagcccccgcagcacgcccttggcggacttggagtgattgtcctgaacgaatgaaacctcggccccaaccgcttcgttgaagcgggcctgattgaagctctcgaaaaagaagccgcgttcatcgccatagacggtaggctcgatcagcaggacctcgggaattgccagcgaagagactttcatcggtcagcccgcctccgccagaagtcgcatgaggtatttcccgtatccgttcttgcagagcggcgccgccagttgctccagctggcgacccgttatccagccattgcgaaacgcgatctcctcggggcacgacactttcagcccctgacgccgctccagcgtcgagatgaattgcccggcgtcgagcaatgaatcatgcgttcccgtatccagccatgcgtagccgcgccccatgatctcgacggtcaggctgccgtcatcgagatagcggcggttcagatcggtgatctcaagctcgccgcgcggcgaaggacgcagcgacttggcgaattcgaccgcccgttcgtcgtagaaataaagaccggtcaccgcgtagttcgacttgggctcggccggcttttcctcgatcgagaccgctctgaaacgcttgtcgaactccacgacaccatatcgctccggatcgagcacgtgataggcgaacaccgtcgcgccgcgatcgaccgacatgccgctcgccaggaggatcggcaggtcgtggccgtaaaagatgttgtcgccgagcacgagcgccgacggcgagccatcgagaaatttctcgccgatgatgaatgcctgtgccaggccatcgggcgatggctgttcggcgtaggaaaacttgacgccccaggcgctgccatcccccagcagctgctcgaagcgagggatatccagcggcgtcgagatgatcagaatgtcccggatgccggcgagcatcagcgtgctgagcggatagtagatcatcggcttgtcgaagacaggcagcagctgcttgctcatggccagcgtcgccggatgaagacgtgtgccggagccaccggcgagaatgatgccttttcgggtcacagcgcccacccccgttccttcaattgatcaagtacgcgatcgacatgcaccgtccattcgggcagggtcagcccaagggcggaactcaatgcatccgtgttgagcgacgaattgcggggccgctcggcgggccgcgggaactcctcggtggtgatcgcctcgatatcatcgggcgccgacgccgacacgaagccgcgttcgaccgccttctcgacaacatgccgggcaagcccgtgccagctcgttcgccccgacgcggtcaggtgatagatgccgtccgcgatcccgccgcgccggtgcgcggcaatcgcaagggcggcgacatcggcgagcagctcgacggccgtcggcgcgccaaactgatccgcgacgatccgcagattcggacgctcccgcgccaggcgcagaatggtcttgacgaaattcgtgccatcggcggagacgacccaacttgtgcgaaacagaagatgccggcaaccggactcggtgatcgccaactcgccggcgcgttttgactggccatagacattcaacggacgcgtctcgtcgttctcgcgatagggcgcgtcccgccggccgtcgaaaacatagtccgtcgaataatggaccagcagtgcatcgctccggccagcgtaatccgccaacgccttcacggcctggtggttgatgcgaaacgccgcatcggcattcgtctcggcaagatcgacctgcgtataagccgctgcgttgacgatgatatcggggcgaaccgcatcaagacgcgcggcgatcgcttccggcttgtcgagatcgaactcgtcgcgtgcgaaggcgacgagattgccgaatggcaacaacgtacgctgaagcccgcgtccaagttgcccgttctttccgagaagcagcacggtcatgcgtattgcttctccacccagttgcggtagctgcctgaggtcacgttctcgacccaatcggcattggcgagataccatctgacggtcttgcgaatgccgctctcgaaggtctccgctggacgccagccgagctcggcctcgatcttgcgcgcatcgatcgcgtagcgccggtcgtggccggggcggtctgtgacgaaggcgatctgctcgctatactttttgccatcggatcgcggctgcaactcgtcaaggacctcgcaaagcgtggtgacgacatgaaggttggcgcgctcgttccagccgccaatattataggtttcgcccaggcgtcccgcctccagcacgcggcggatagcgctgcagtggtccgtcacatagagccaatcgcggatctgcatgccatcgccatagatcggcagaggacggcctttcagcgcgttgtggatgaccagcggaatgagcttttccgggaaatgccgcgggccgtaattgttggagcagttggtcgtgacaacaggaagcccgtaggtatggaaataggcgcgaaccagatggtcgctcgccgccttgctggcggaataagggctattcggccggtagctcgtttcctcgttgaaagcaggatcgtcagcgtcgagggttccaaagacctcgtctgtcgagacgtgcagaaagcgaaagtcggatttcgtctcaaggccaccccaataggcgcgcgctgcctccagcagacgaaacgtgccgagaatgttggtctggatgaaatcttccggcccgtggatcgagcggtccacatggctctcggccgcgaaattgacgacggcccgcggcttgtagcgcgaaaagagggcgctcagcagtgccgcatcgccaatgttgccatgcacgaagatatggcgcggatcgttctcgagagaccgcaggttattcagattgcccgcataggtcagcgcatcgagattgacaaccggctcgtcgtgttccgcgagccaatccagtacgaagttcgagccaatgaagccggctcccccagtcacaaatatcatcgcctacgcacctctcaaccaacgcaaacaccaggattgacgacgaatttcagtagacgttgctccgatcctgcaagccgatcgccgtcatcacgacgatcctcagatcaagccacaacgaccagttgttgatgtaccagatgtcgtgacgcacccggtccgccatccggtcgaccgtcggcgtctcgcccctgtgtccgttgatctgcgcccagcccgtcaagcccggcttcacatgccggcgagacgcgtattgagcgatcaacgttccgtagagatcgtcatgcgcaagggcgtgcggacgcgggccgaccacggacatctcgccgcgcagcacgttccagaactgcggcagttcatcgatgctcgtcgagcggatgaaggcgccgacgcgggtgacgcgtggatcgttgcgcgtcgcctggcggatgtcgccggaatcttccatgaccgtcatgctgcggaatttcaggatccggaacggcttgccgttgtgccccttgcggcactgcatgaagaagaccggacctcggctatcggccttgatggccaacgccaccaaagcgcagagcggaagcgtcaccgtcagcgcggcgatcgagaaacagatgtcgaacaaacgcttgacgatacgctcgaccagaccgagcggcgggcggtggatctggaatgcacggctctcgccgatgtcctgagcaaaaccctgggcgatatcgccaacgagacccgaaaacatcacgctcacgggaacgcagaactcgcgcaaagccgacaggcattcttccagcgctgccgcatttgcataatcgccccagacgatcaggacctcatcgacatcggtgataccgttcttctgaagcctttcctgcagcaggctcggagtatcgtcggcgccgcgcaggtgcattgtatgcttgatggacagcccgccaagcgcggccttgtggatgagaggctcgaccggtgtcgaatccgggcagatcaacaggacccgcctggtcgggaaggacgcgtgagcgaccgcacggttcagataggaataccacgcgagcctgagcgtcgtcagcgctccgaatgacagaacggcagccgacagaatggcgccgcgcgagaccatcggtccgatcttcaggaagaaaacaatcgcaagaagaaatgccacgaccgctggcagaaacgtgcagatgatcgccatctgcctgcgaaacgacagaagcccggcggggcggtaggcgtctgccccacccagtgccaggacgaagacggtggcgaccagcaggccaatgcccgcatatcgtgaccaatcgccatccatacccaagaatacttgctcgtacagcatgtatcctccggcgcttgcgaagaatagcaccgcgaagtcaagaatagcggcgacataggtggtcgccacagcattgaagctgaaccaccgtcgatcatttctggctgaaagccgcacgttccagctgtgttccactggcatggtcataacgttatcctcaacccgccagcctagttaacacaagattaatgaacacaacaattcgccccggaatactccttatttagtatttcgaagtaggaatacgtcaaaccttgcagtttttccgattgtacgacttggcgttggagtaaaattgaaaaatacaaaccatgagtaggcgtttggaacatccgcaaatggcgaccgttttggtagtagaatatttggctgccgatcagcccccagggatgacgcgccagactgcggcgtcagacgaaccgcgcggaaagcaatagtaggcaggcttcagacgcctcggctcgggaagcgacgccatccgcaaagcgacagccgtctatgagctgacggtgacgcgctgtcagacccgtcgtataatttcagatttaattgagattacgcgaatctatacttgaagacgggccagaatttcgttcgtcaggacgttcgccttccgctgcgccgtcactcgtccagctgatcgtcgtcgtcatcaaagccatatgacgcgccctgcatttcgaccgtcatgtgctgataggcgcgcgcctttatttcgttgctgatcagaacgatccaattgtgggcacggccgaggcccgatccattttcgggcatcacgagcgccatgcaggtcatcacccgcggcccggtctcccgatagggctgcatgctccaggcaaagggctcatcccgctggcggcgtttgcgaaacgtaacgctgcgcttgcgcgcactcttccacgccatcgtcatcgacccctgctatcgacaccgcggatgcaacgccggcatccgttttcaagtcgcgccttatggatcacccgaacagcaagcggcttcgcatgcatcgaccggcgggcgatgccggcctgcccgcacgggacggtttggctcgcgccaacgaccacaaactccgtaagtccctctgccatcagcgtgcgcctcaaatgtcatctcactcatgtcgcgatgaaaagcagcttgcgcgttcagatatcgccccatcgtccggcggagcggcaacgcgaaaacgcacgcgaccggtgagattttctgagcagggagtgccgtcgacgagcgatttcatcggacgagccgaaattcatcaacgagggcgagagctcaaagataccttgattggagatggttgttccgacgggggaattctcgacgcgagaaaggaaaagtatctcatcagagctttcatcgacggggccgattattatttgctgtttcctcattttttcccccgaaagcacacagacgacacctccggacaagaactttccggaaactatacatagactctaaggaagccgcactcgacgatattgttctcattcacattattattaacatgaaacaatgctaagcgcaaaaatccatccatgcaatagtcaaaatttcaatttgataaagtgaagattgaacagaatgaccgacgaatagaaaatagcagatacgcccatcattgacaccggtatattcgcgccatcacgtcatcatttcggatatacccataactacgatggcgttacttggaataacgggcacggaaagcgcggcaaccggaagtattcttcatgcaacgtttttgtctcgcgtggcgcgacgaatgatggccgcccagggggaaacgatcaggcagccatacggcggctggcaagcaccgcgcggcgctcccaccagaccagcaggaggcttgagcagacgatcagaaccgcgccagccacgacgttcacggtcgggatttccgaccagatgagatagccgaagagaaatgcccaaacgagaccgctatattccatgggagcaagcgtcgatgcaggcgcgtgccggtacccctcgtaaagcaggaattgcccgagcgccgacaccgcgcctagtccgagcatcagcgcccatccttcgagatccggcgatttccaaacccatggcagcattattccgcatgcgatggcgaagaggaagctggtcgccatcatctggttcagcgtgctttcgaagcggctgaccaggcggacaagcacggtgctccacgcccagcagaagcccgcgaacagcaccatgagtgttggcccgaggcttggggactgggtgggattggcggcgacaattacgccggcaaagcccgcgaaacaggcaaaccaccgcattggccccacattttccttcaacacgagaatggaaaggaagataacgatgatcggcgccgagaagtacatggtcgtgatctcggcaaggcccagatgcctggcggcggagtaataggccatccaggcgcccagcatcagcatggcgcgaaggacgagcgagccacggtgagcactcttcaggatggagggatggcgcaaccgcctgaccatgaaacccgccaccgcgacgatgatcacgctgcggatgaacagaatctgcggaaccgcatagtctgcaaccagccacttcacgacagcatcctgaatcgcaaacagcgaataacccgcgcaggacaatgcaataccaacgagcgggttgggcgaggtgtctgaagcgcggacttgcatggtgtggcagcctgaatgcggcattgatgatggtgagcacgtagcaagaagttgccgagggaacaatggctagttttggccccggcatcggcgccggcgccgcgcgcatcgttgcttgaacgcgccatcttgcatgcgagccacaatcgtagtgtatcagtgaatgacttcgaagttcggcggagaatgcacgtgaccgacaagagcgcatcgcctccctacgtgctgctttcatggatgctgtggccggcgctattcgcagccggcttggtcggcgccggctttgcctttaaggcacaggcgccgctgctgtggttcaacgtggtctatctggcgatcgtcttggcaatcgccatgttcgagcgcgtaatgcccttcgagaagcaatggctgaaccgcgacggggagacgctcaacgacatagcgcacacgttgctcagcaagggtggcgtgcaactggccgccgcaatgggcgcaaccgcgccaatggcggtcgcgacggtcgcccatccgtttgtcattggcttgcccgacatgtggcccggcagctggcccctgatgctacaggtgattcttggattggtaatcgccgagttcggactctacgtcgcccaccgcgccgctcatgagatcctgccgctctggcgatttcatgcccttcatcacagcgtcgagcggctttgggtcgtcaatacgggccggttccatttcatggactcgctgttcaagatcgcactcagccaactcccgctctatctgctcggtgcgccattgccggtctttctatggatcggcgcggtaaccgccttcatcggccttctcacccactgcaacatagacgtgcgtacgggcccgctcgatctgatcttcagcacgccgcgtctgcatcgctggcatcattcgcgcgtgctggccgagggaaatacgaactacggcgagaatcttgtcttgtgggatcagttgttcggcacgtacttcaatcccgaccgtcgcccgccatcgaacatcggcatcagcggccgcgtcgccgacagcttcattgggcaattgctacagccgttctcgacgaagggctatcggcaaatccttggccgccgggttcaccccgacggccagaagatagcaacaggtgatagaggatcgccgagcccgtccggcgccattagcgagaaccatcaggtccgcacggatagcaccgcgtagatgccctattccgccgaagcgctccagcgtgagtcggactggaacagatcattaagcttgtaggccacctcggtacggttcgtcgccttgagctttttcatgatgttgcggatgtgaaccttcacggtgctttcgcgcagattgagttcataggcgatgatcttgttcgccttgcccttgcgcaacgcctgcacgacttcggcctggcgcagcgtgaacatgcgtgacagctctttcagccgtggcgcgttgtcgacgggagcggaggaggtgaagctcttgccggcaacgatgaaggtgccgcccgcgacagcgagcccgatggcctcgacacagacttcaatgcccaccgaggtggggatgaagccgcgcgcgccatgctcgatcgcccggagagtctggtgaaggtcgtcgccatcggcgaggatgacgacaggtgccggcgcaagctccgtggcgatgctggcgatctcttcgtaaagagcgccatcccccgatgcgcgaccggtgatgttgagcagaaccgccttcacgcgctgcgtggcgtctttcttgcgccgccattccgccaccgagcccaccgcgcaagccttcatgccgaggccgttctgcgtcagcgtcgtcgcgaggcattctcgctcgagtgttctgctgtcgatgatcagcaggcaccggtcctcgcccagagccttcatctcacccaggtcgctgagcgctctgggtgccacggcaacggcctgaagtctgttgacaggcgtgcgtccgctttcaaattccgaaggtacgtaattcatactagcctcatactcaatagtgttagaggtgaccattcgcaacgaaatgcaatactcgggggacatcggcgtgtattaagtcagaaaagtagtttatccgttttggatcacttatcacgtgtggtttctactttgttaagaacctacatacatcagtagtgacaatcaatacaaaatatttcgccagacttagattaaaaatgccgagtatataaaattgtacctccacatgctaaaaacaggaattaatttttactcgataggaaaaacaccatccaagaagcttaggtcatttattctttggaaataccgtttcttaacgataataatcgtttgtgttttcaggccacggtatagcgtcaaattccgtattgttctgacatagacaaagcaaataccggcccaggcaatactctagcaacgcctccatagcggaacgacgaaagcaagctaatccaattggttaatgccagataaaccttgcaggcagggatttcggagcattcttgggcgatattgggcgctgtggataacatccggccccagagcgccgatcgggccggcgcgcaggcgtccgagcaggcgatttcgcggctcgaacgttcaggtcttgcaatcgctttactttcgtcctctaaagcgacgctgataggtcgcatcataaagagaactctcgcgaaagtcggtcgacgacagagatgggccgacaaagatgatcgctgtccgctcgatcggctcggcggccaccttggcctcgatgtctcccaacgtaccgcgcacgatcctctcgtcctcccagctcgccttcaccacgatggcaaccgggcattcgtcgccgtagagcggcgtgagatcgttgacgacccggtccagcgcgtgaatggcgagatggatggcaagcgtagcgccggtggcgccgaattgcgtcaaggtctcgccatcgggcatcggcgaggccctgcccgatacccgcgtcaggacgaggctctgcgcgacttccggaatggtgagctcgcgccggagcgcggctgcggccgcggcgaacgacggcacgccgggtgtcatcgtgtaggcgatcccatgcttttccaggcgacggacctgttccgcgacagcgctccagaccgaaaggtcgcccgagtgcaggcgcgcaacatcctcgccggcattggcggcacgcagatattcagcctcgatctcatccagcgacatgggagcggtatcgacgatccgcgcgcccggcgggcaataagcgagcaggtcgggcgagacgatcgaaccggcgtaaaggcacacagggcattttccgatgagatcgcggccgcgcacggtgatgagatccgcggcacccgggccagcgccgatgaaatgaacggtcatatccttgtcctcaatccttgacccagtgccactgtgtgaccggcattgccgggcgccagcccgtcatcgcgccgatcgcaccggcgcgggaaatgtcgatgcgggtcaacgacccgcccaacgtagtgtgcaacgccagcaatttcgcatccatctccagcgtcaccgcattggcgaccagtcggccgccgctctttaacgcggcgatcgccgcctccatcaccccgtcctcgctgcccccgccgccgacgaagatggcgtctggttcaggcagcgactgcaacacctgcggcgccaggccctgcacgacagcaagcgccggcacgccgaaggccgccgcattgcgcgctatccgctggactcgctcgctcgactgttcgatggcaatcgcccgaagcgacgtgtcgcacagcatccattcgataccgatcgacccggagccggcgccgatatcccaaagcaattcgccatgccggggcgcgagcgcggatagtgtcaacgcgcgcacctcccgtttggtgatctgtccgtcgtgctcgtagagcgcatcgtccaatccgggcgcaaaggccagcacccgtgcgccctcgccagccacgacatcgatggcgcagacattgagcggatcgatgtcttcgatatcgaacgtatccgcgtgggaggtccggacctgctcacgttcgccgccaagcgcttcgagcacatgcatccgcgaccggccgaagccattggccgcaagcagggccgcgagttgcatcggggtcttttggtcggaggtgagtgcgatgatgcgccggccgtggtgcagatgcggacggatgagatcgagcggacgcccatgcagcgaaacgctagcaacttcctgcaacggccagcccagccgcgatgcggcaaggctgaaggatgatggcgccggaatcgcgcgcatctccgcggcatcgatgctccgcgacagcgtcgcgcccacgccgtagagaaacgggtctcccgaagcgagcacgacgacaggcgaaccgcgacgcgccgtgatcgccgcgaccgagcgctcgaaggggctttcccacgcgaggcattcaccccggatgaggccggccataagggcatgatggcgtgcaccgccgaagacgacggacgcggcggcgatcagccgcttggcctcatcacccaggcccgctggaccatcctcgccgataccgataatagtcagccaaggttggccgggagcggaagatatatcagccatgagcaaaatccgcattctgatgcttggcggcacgaccgaggcaagcgcgctcgccaaggccttggccgctcagccgcgctacgatgccctgctgtcgcttgccggcaggacggaaaaacccgcgccgcagtccctgcccacccgcattggcgggtttggtggcgcggaggggctcgcgacatttctgcacgacgggcagttcgacctgctgatcgacgccacccatccctttgccgcacgcatctcgcagaacgccgcgcaagccgctgccatcagcagccttcccgccttctgtcttcgccgcgcaccctggcaggccgaggcgggcgacaattggtggcatgccgcgagcgtccaggatgccatcacgcaactcggcagcgtgccgcgccgcgtgtttctcgccatcggccgccaggaggcgcacagggcggatgccgctccgcagcaccactatctgatccgaagcgtggacccggtcgatccgcggcccgtgcttccccacgcgcattatattctcgatcgtggcccgttcgatgtcgaacgcgagactgcgttgctgcgggagcacggcatcgatatcatcatcaccaagaacagcggcggtttggccacctatgccaagatcgcggctgcgcgcgcgctcggcatcgaggtgatcatgatcggccgcgccgcagcacccgtcattccagcggtcgctaccgtcgacgaggccctggcgatgatcaatcacctgctgcccccgggctgaagcgaggggtgtagatgagatcggccttgccctcccgctcgatgatcttcgtctccgccgagccgatgatcacgcaggtcgccatatcggccatcgccgcatccgctacattgagcggctgaacggaaatgcgctcgtccggccttccggcggcgcggccgaagatgacaggcgtcgagccgggaagcttttcgcgcagcagctcgaacgcctttccaagctgccagggacgcgccttgctgatcgggttataaagcgcgatcacgaagccgccttcggctgctgaagccaaacgcttctcgatcgtcgcccagggcttcagattatcggaaagcgagatcgcgcagaaatcatgcccgagcggtgcgccgacacgggcggcgaccgccagcattgcggtgatccccggcaggatgacaatatcgacgtcccgccaggcgtccggaccatcgtcgaccgcctcgcagacagcggcagccatggcaaacactccgggatcaccacccgaaacgacacagacgaccgcgccctcggacgcggcccgcaatgcggcgccagcccgatccagttcctctcgattgtccgacgcctgacgcgtctggtcggcccgcaggttcaggcgatcgagatagggtccatagccgaaaaagacggtggccttcgaaacggcggcatgcgcttccggcgtcatctgatcgggattgcccgggccggtgccgatgacgaaaagccgtccgctcatcggttgctctcccagccgggaacgagcaccagcgaaaagtaaggcgcatcgccttcgggccggtcggcgagcttgatcatcgccgcgttcgccatggtgccgcgctcgacatagaccgcttcggcaagacgccccgacgcctgcagcgcgcggcggatcttcggcaggttgcggccgaccttcatgatcacagccgcctgcgtatcggacaggcggcgctcgagctcctgttcggccatcgtgccgggcagaaccgacaacacgtcgtcgccctgcacgatcgggatgccggcaacggaccagcagccggacatcgcgctgatgccgggtatgacctcggtcgcgtagcggctggcgaggcgcacatgcaggtgcatgtacgagccatagaacagcggatcaccttcgctgaggactgccacggtgcggccggcgtcgagatgcgcggcgacagccgacgccgactcctcgtagaaatcggtgatctggcgccggtattcggcttcgctcttctcgatctcggtggtcacgggatagtagagcggcaacatgacggcgtcgcgcccgatcagatgctcgacgatcgccttgccgttaccgcctctgccgcgcttggcgaaataggcgatcacatcggcagcttcgattgccttgacggccttgacggtgagcagctccggatcgccaggaccggtgccgacgccgatgagacgacccgcgccgctcacaggccgggcctcgccagggcgttgacggccgccgctgtcatggcgctgccaccaaggcgtccgcgcacgaccgcatagggaacgccataggagttttccgccaaggcatccttggattcagcggcaccaacgaaaccgacaggcatgccgatgatcgccgccggcttcggcgcgccatcgcgcaagagctcgagcaaatggaagagcgcggtcggcgcattgccgatggcgactacgctgccggcaagacggtccttccacaggtgaagggcagcggccgagcgcgtgtttccggtttccttcgccagttccgcggtacgcggatcgtgcaatgtgcagatgacatcgttcttggcgggcagcctcgtccgggtcacgccgtgcgccaccatttcggcgtcgcagaagatcggcgcaccggcatggagcgccgcgcgcgcggcgctgacgaagtgcggcgcgaacacaaaatgctcggctgcttccaccagtccacaggcatggatcatgcgcacggcaacgtctgcttcctcggcggaaaaccgcgacagatcggcttcgctgcggataatcgcgaacgaccgctcatagatggcgtcaccgctgtggatgtaatcgtagtctggcattcctattcctgtcgcagcgctcgcgtaatcgtggccgtccccaccctgtcaagacaggccctagcagattcgccagcttgtctttcatttttgatgagacgggaaagcctctctatagcggaattgatatcactaccagcaatctgtgcatcgggcgcgtccgacgcgaggccatcgagaacaagattatagccattttccgctcccgcgaccgtaaaggcgcggcgcgggtgggcacagcccttggtacagccggacaaatgcacgtcgagcgagccatccagaatctccggacacccttcgatcagcgccccggccagggccttggtggcgtagaaactcgacgcgcaggcgcccgcgcctgcgcaggtggcgatacgcgatgagagatcgtcgcggttcgcggatagaccgaagcgctgcgccgattgcagcaccgtcaccgcgtcctcctcgctcaggccggtgacgaaaagacagcgaccgggcgccggccggatatcccccacatcgagatcgccgaggaatatcagaaacgccagaaggtcggccgcctgaatttgcccgaaccgtagtttcaggccgatgaccgccatgccgtcctcgactgcattgacgccgaccgacggtgtctcgcccatacgcggatggtgcgaaatggcatgcatctcggggaaggtcgacaacagacgttccggtgagatatcgcggcaacgcttctgccagccgatcgagagcagcagcttgagcaattcgccaaccgccgcgattgcctcatcgacggagcccgcggcaaccggacgggcactggcaccatcgccggcgatggcaaccacccactttcccgctgttacggccagcagcctgatatcggccgtgacgtcggcgagatcgaagcggccaccgccatcgacgatgattgaaagcttcggcgccagccccggcgcctgcaaatgctcggcaagccggtcccgcagcgccaattccatggcggcggcgtcagcgacatcaccaaacgcctcgccatgcagcggcggcagttcgatcacgggattgggcgacacgatgatgcccgccgcatccaccgcttcggcaaacggctcgaccgtctccgacctaagtccccggatctgcaggctgcctcgcgccgtaatctcaagcaggccattaccgcaacgcgtcgcggcatgagcaagcagtgcgcactggcgaaccgtcaggatgccgccctgcggacgcaggcgcgcaagcaggccgtctcctgtccgcataggccgcgccaaggtcggacaggcgccgcgccgcgcataggcttgcgcggcctcgcctgtgatttccgtctcgatgcgctcgtcgcgtgtcatcccgccatttccttccgcccggtgcttacagaattgagaagcacgggcaaaaccatcgccaccctcagaggtcgtcgaaatcgcgacccttgcgcagcaggtagatatccatgatccaaccatgtcgctcccgcgcttcggcgcgcagcttcacgatatcggcggcgacatcgccgagccgccccgagcgcacgatctcgtcatccgtcccgagataggcgccccagaagatttccgcgtccggatcatcgatcttggaaaaggcctgctctccatccagcatgaccacggtgctgtccgcccggttcccatgctcgacaagccgccgccccgtcgtgatctcgaccggcttgccgaccatgttgatcggaatgcggtggcttgccgccagggcctggatgctcgtgatccccggggtgacgctgaagtcgaaatcgacggcgccgagttcccttgcccgctcgatgatgcggatgacgctatcataaaggctcggatcgccccagacgagaaaggcgccgacgccgtcttcggggagatcgtcgatcagccgcacataggttcgcgccagtgtcgcgtgccagtcgtcgacgctttcgacataactgcggtcgaccgtcttccgctgcggaatggcgaactcgataatccgggtcttttcattggtaacgaagcgctcgcaaatctcgcggcggacggaagcgagcttctccttctcctcgcctttcgtcggcaggaagatcatgtccgccgcgttcatcctgccgatggcctggatggtgacgtgctcgggatttcccgttccgataccgatgacgtagatgtggcgcacgccggctctcctgatcaattcttcctgcttgtgacgcacatgctccggcgccgcaagggcatggctcaaacgggcggcgatgagggagcggccgatcgtcgctgaagattgctgccattttcgaatcgtgcgatcctttgtcgataaagatccgcatggcattggcccacatgcctcggacaacaagcgcggcggcggctgagccgcgccgaccaaataaagcaggaatagccgggcatgctcgcgccgagacgatttttgagaccattgacggaacgtgagacgcaggcccgcccgacggtcgggaacgcccgccgatgaaccacgagatcgatgtcacatccttgatgacgctgctgccgctcttcgttcaggcggaagacgccctggcgcggctggacgagcgcgcgctgcgatcctcgatcgcggagggcttttccgagcgccgtcactttttcgacgctgtcggcgccctgtgggtagcgggcgaactggtgcatctggaagacctcgtgctgcacgacgcccatatggacgcccgcacgcccagccacgaactgaccattgcgcatgcagtcctgcgcgcgcgccgcaggatatggacgagcgatccttattgggccttgagcgaagccggcatgacggttctgacggggatcggcggcgagcagcagagagcgccggagttgaagagcgcttatcgcgatcacgacaatgacgatcatgagcctgatgcgccgctcgccaacgaacttgccgaaatcgacgccgtgctggcgcggtcgagcaggctcctcgacgatctcgcgcggggcgttcgggacacccaccctgagcccgcgcggcaggagcggccggacgaccggctcgcgctgctcgacgacgaggactgggacgaggccgcgcgcctgcgcgaatggcgctccgtcatcgcgattgccgacgcattgccaccgacactgggcgccgccgtactgttcgatgcatgggagcagatcgagccgctgcgccgccagcattggctgggcggactgctggttgcaggctatctgcgccagcgcggcaagatcacgtcgcacctcttttcatttttcgccggcttgaaaaccgttcgccacgaacgccggcgcgcccgccagcgtctcgtcaggctgcaatcctttctcgaagcgatggtggagagcgccgatctcggcatgaaggagatggatcgcctgtcgctggcgcagacacagatgcagatgcgcttcaaggacaggcgctcaaacagcagccttccgcaccttgcccaattcgtgctgtcgcggccgatggtgtcctcggccatggtggcgcgtgaactgaaggtcagcggccgaggcgcgctcaatctgctcaaagacatcggcattcgcgagatcaccgggcgcggacgctaccgtgcctggggcattatctgaacgtccaggaagtcaggccataatcaaacggaaaagcggccggacttgcgcccggccgcttccctgtggtgaacacccgatccgcgcatcctgtcacagagtgcggaccgggcgttctagcgcttcctttgcccccagaagcgctgtagctcgactattcgcgctcgccggtgaagttgagcagcagctggaagatgttcacgaagttcaggtagagcgacagagcaccgaatacggcaagcttctggttcgattcctgatcgtggttttccgaatactgttccttgatgttctgcgtatcgtaggcggtcaggccgacgaagacgacgataccgatgaccgaaatcgcgaactgaagtgcgctcgatccaaggaagatgttcaccacgctggcgatgaccacgccgatcaggcccatcatcaggaacgagcccatgcgggacagatcacgcttggtcacgtagccgtaaaggctggtcgagccgaacatcgttgcggcgatgaagaaggtgcgcgcgatgctggtgccggtaaacaccaggaacaccgatgccatcgacaggcccatgacggcgcagaaggcccagaatgtcatctgcgcggcgcctgccgacatcgtctggatcttgaacgtgaagaagaagacgaaggcgagcggcgccagcatgaccacccacttgagcggcgactggaagatcggcacatacagcgccggcgtcgagccgacgatgaaggcgatcatgccggtgatgacaaggccgatgcccatgtagttgtacacgcgcagcatgtgctggcgaagaccttcgtcaaacagggtctgcgagccaacggccgaaccgtaacgctgctgattgattggattcatagagatctcctcggtttaactagtaaagggtacgggcaagcctgtcggctgcctgatccagtgtgattgagcgatccgccgtcaccagtgcgtaagccacgtcaccgatctgccagtaggaggcttcggcgccgttcagcccgatatggttgaccgactgaacggagaagacgcccggccgaacggcaaacaacgaaagctgcttgttgtcggccacgatcgacatttcgacactcgggccgaactcggacgggaatatctgcacgtccgaaatcgtccagtcagaaggaagctgaggcatgacgatgccggtcgccgcacgaatttcatccggcttgtagctttcgctccgcggtgacgagacggcctggcgcaccaatgtcgtcttataggcctggacggcatcctcgacataggcgggagccgggacggacgcggcgacctcggtcgcggtaaacgcaccgaacgaggtatgagcgacccagcctgccccgaccaagacggcgacagcggcaatccgctgcatgacatggaatatccggccataggcgagcccgcgctcgaggcggcgcgcgacatcgcgcgtttcagcacggccggaggcgccttcgtcggcgagcgcaaggcgcaattcgccgcgcatgctcagatccgccatgaccttcgcggccgtttccggattctcggaaaggtaggattccacctggattcgacgggtcacatcgagctcgccatcgatataggcatcgagatcggcggcgataatgggatcaactactttcattgccgcctccttcgatcaatctcaaatgtggtgcacgcggtgtcgcttcctcgatttcgcgcaactgggcacgggcgcgtgagatgcgagacatcagcgtaccgatcggaacgccgagcgctgcagcagcttcctggtaggagaggtcttcgatcgccacgagatgaagcgcctcgcgctgctcttccggcaggcggaagaaagcattgcgcacctgctgcagacgcacggcatgttcctgcgcggctggcaaggactgctcggcctccacggcggcctcatcgtgccgtcgtgtcagcgatcgcccctggcggacgcggtcgatgtgagcgttatgcacgatagagagcaaccacgtacgcaagttaccgccgctgcggaagctctgcttcttctcgtatgcccggaccaaggcatcgtggaccagatcttcggcgtcatccgaattgcgcaccagcgagcgcgcgtagcgccgaagcgctgcgagctgaccgatgacatcgaatgggcgttctttccgttccatgattgagtatacggagccacgcgttgttttattccccaggtctgcgattttttctgcttttttgccgccgtgaaaatgtcgcgcgaacaatccgcccgccagcgcgcaaaatattacatgaaaatcacagccttaggcggaatcccagaaatatccgccgccgcagccgtgggatcgtcaggcgtgctgctcatcggacaactcctcaaggatgggacagtccggcctgtcgttgccgtggcaggcgtgaaccagatgctcgagtgtgtgcctgagttcgctgagttcgcggatcttgcggtcgatctccgtgagcttggcctgggtcagctccttcacgtcggcgctggccctgctcttgtcctcgtaaagcgccagcagctgccggcactcctccaccgaaaagcccagcccgcgcgatttctgcaggaagcgcagcttgtgaacatcggcgaccgcatagtcgcgatagccattgccgtttctatcaggcctaatgaggccgatatcctcgtaatagcgtatggtcttcgatggcaggccggaacgcgccgatgcttcaccgatgttcatggcaggctcctatagctttgccgcgcgcagccgcagcgcgttaccgatgaccgaaacggacgacaggctcatcgccgccgccgcgatcatcggcgacaacagcaggccgaagacaggatagagtacgcctgcggccaggggaacgccgagtgcgttgtagccgaaggcgaagccgaggttctggcgaatattgcgcattgtcgcctccgccagacgccgtgccctgataatcccattgagatcccccctgaccagggtgatgcccgcgctttccatcgcgacatccgctccggtgcccatggcgatgcccacatcggccgcggccagcgccggcgcatcattgataccgtcaccggccatggcgaccaccgcccccctggcatgcagttcatcgatcagcgccttcttgccttcgggcagtatgtcggcgcgcacatcgtcgatccccaggctcttggcgaccgagcgtgccgtgcgctcgttatcgccagtcgccatgatgatcttcaagccgctcgcatgcagtgccttgatcgcggcggccgttgtcggcttgatgcgatcggcgacagccacaagcccggcgagccgctgatcgacgacgacgaacatcaccgtcttgcccttgtcccgcagcgattgcagctgcgcgtcatgggcggccacgtcgatgccgagatcggccatcatcgccgcgttgccaagcgccacggctgtcccgccgacattgccgcgcacgcctttgcccgtggccgcatcgaagcccgtgatatcgagcagggcgatcccgcgctcttgcgcccccgccacgatagccgccgccagcggatgctccgatccgcgctcgaggctggcggcaagccgcaggagatcgccttcgactacatcaccgagcgccacgacatccgtcagccgaggctttccttcggtcagtgtgcccgtcttatcgacgatcagcgtatcgaccttcgaaaaacgctccagcgcttccgcatccttgatcagcacgccttcgtgggcgccgcgaccggtggcgatcatgatcgacatcggcgtggcaagtccgagcgcgcaggggcatgcgatgatgaggaccgaaacggcggcgagcagcgcatagaccatgcgcggttcggggccaacgagagaccagatcgcgatggctgcaatcgcgacggccacgaccgccggcacgaagaacgccgatacgcgatcgacggcgccctggatcggggcgcgcgagcgctgcgccgtggcaaccatgtcgacgatccgcgacagcgtggtctccgcaccgaccttttcggccgtcatcaccagcgtgccgttcttgttgatggtgccgcccgtcagggcatcgcccacagccttttcgacgggcatggattcgcccgtcagcatggattcgtcaatcgtcgactgcccctcgctgaccgtgccatcgaccggaattcgctcgcccggccggacacgcaagtgatcgccaaccacgatatcgtcgaccggcacatcggcctcgacaccatcgctaccgatgcgtcgcgcggtcttcggcgcgaggtcgagcaatgcccgaatggccgagccggtccgctcgcgcgccttcagctcaagaacctgcccgacgaaaacaagggcgacgatcactgccgccgcctcgaaataaacgggcacggcgccgccatgcccacggaacatatgcgggaagatgcccggcgccacggtggcgagaaggctgtagatataagccgtgccgacgccgagaccgatcaacgtccacatgttggggctgcggttgacgacggacgcccaggcacgtcggaagaacggcagcgcggcccagagcaccacaggcgtggcaagagcgagttctgcccaggtggcgagcggttcgccgagccaatcgcgaacaggcaagccgatcatcggccccatcgcgatgacaagcaacggaacggagagaatgccgctgatccacaggcggcgggtgaaatcgaccaactccgggttcggcccctcatcgatgggcgggatgcccatcggctccagcgccatgccgcatttggggcaatcgccgggatgatcgctgatcacctctggatgcatcgggcaggtatattgcgtacccttcggagccggtttcggttgcggcttgctgccatcgcgataatccgccggtgcagcctcgaatttcgccttgcagccagccgagcagaaatagtgcctctcgccttcatgtcgcaggaagtgcttggccgttgcgcggtcgacgctcatgccgcagaccgggtcttttgcggtcagatggtcctgcggcgcagcctcgaagttggctcggcagccctcgcagcagaagaaatagcgccggccctcatgctcggccgacggcttgccggcggcggggtcaaccgtcatgccgcagacgggatctcggaccgcgccgtcgtttcccgcatgatgatggtcgccgtgaccgtggtgatgggcgtgggtgctttccatggctatctcctgtgcctgacaaggcagtggagatcgttatcaaccttccagcaactggaaggtcaagcgcaaaatgcaagttccttgatgacggtcaaaaccgcctcaatcaatgaaaacgccgacgcttgccgcgcgtcccatcgcatcgatgaccgtcagcttcgaatagccgccgccatcaggcgtccattggttggtgcgccgccgagagatatccggcaggggtttgccgttggcaagccaccggaagggcgcccgaccaccctgcagcctcagcatcagcggcgacagatctcctccctttaccagacccttggcccccagatcgacatgcgcgccctccggcggatagacgatctgcggcgccggctcgcgaccggatgtggcaagcaatccactgggattgacggcgaagcgacgctggctgatcggcagctgagcctgcgcgatgcgcacggcgcccgacggcggacgcggcagcggcgtcgtcgcgagacccgacttggcgaagccctcgaacaggatcggcgcggccgtgccatagccggtcagcccgggcgaggcgccgttgtcgggacggccgacccagacgccgaggacataacggccgtcatagcccaccgaccaggcgtcgcggtatccatagctcgtgcccgtcttgtaggcgatgccgcgctgcggcgcaccggcgggcggaatgacgccagagaggatgtcggcgacgttccacaccgcgaccggctccagcagcgcctcgccttcgatctctcccggctggcctaatatgccatcgccaatccgaaccgcctgccctcggttggcgagcgccgtgtagagctgcaccagatccttgagcgtgaggccgacgccaccgagtccgatcgcaaggcccggcgtttcgttgaccggcaagagcgggcgcacctcggcgcgacggaagcggatgaggagcttggccgggttgacggcatcgagcagcttgaccgcgggaacgttgagcgagagttgcagcgcatcgcgcaccgtcacgtcgccctggtagctcatgtcgaagttgcgcggccggtagccgaagaagtcggccggccgatcctcgatgatggtctcctggctgaccagcccttcttcaaaggcaagaccgtagatgaacggcttgagcgtggagcccggcgaacgcgggacgcgcgtcatgtcgatccagccggatcgactcgcgtcgaaataatcggcggagccgacttcgccgacgatatcgccggtctgcgcatccgccatcaccatcgccagcgacagtttggggccaagcttcaatgtggccgccttggcgacggtctccaatccctcctggacccgcttcttcagcgtggtccggtacggcgaagcgtctggggctttgcgcaacgccgcttcgccgacatgggccgcgagcgcgggaagctgcatgcgtttcgccggcacaagcgttgcctcggcacgttcggcctccccttccccgatggcatcgacaacagcgacgcgctccagaacgcgcttgcgcgccgcctcggccgcctcaaggttgcggtcggggcggcgtttttcgggaagctgcggcaatgctacgaggagtgccgcctgcgccaccgtcagccgcttcggctccttgccgaaataagcaaggctcgcggccctgacgccctccagattgcccccatagggcgcatgggtcaggtaaagatcgagaatctcatccttcgacagacggcgctcgatctgcagcgcacgcgccacctgcaacagcttggccgagagcgaacggccctggcgcggctcgatcaggcgggcgacctgcatcgatagggtggacgccccggaaacgatgcggccgttggcggcaagctggaaggcggcgcggccgatcgcgcgcgggtcgacgccgccgtgctcgtagaagcgccgatcctcataggcgaccagcatgcgcaggaattgcggatcgacatcgccaacatcagtcttcagacgccagcgcccctcgggcgtggcgaaggcgcgaagaagctgtccgtcggcatccagcacctcggcggagacacgcatcttgtccagcggcggcggaaacgccttgtccgccgcatccagaccgatcaacccggcgccggcaattgccacgccggtgacaacgccgatcgcgattttccgccccagtctcatggctgtgccgccacgacctccatcttgccggttgccgtccgggccgaaaactgcggccggtacatatcctcgacattcgccgccgggtgatcgtaaacgcctggcgtaacggcgcgcacaacgtaggcgacattgacctccctgttgtcatcggcgctgcggttgaaggcggcgacgaagcgatcgttgcggaattcggtgtgagcgggcgtgacatcgccgatccagtcgaaattggtcagttgggcgctgtcgacaaggctcggattgtcgatctggaagccggccggcagcagatcggtgatgacgatgcgcgacggccacttgttgctctcggtgacccgcagcacgacgacgtatcgctcgttctgctttgcctccgagacattcgcttcctcgccatccagcgtgtaatagctgcgttcgatggcaaagccatcaccacccgcgggcagcggcgtcaccggtgcggcaacggtggtgaccacggccgagacagcgtcgctcgtctggttggtcagggtcagcggatagtccgccagcgcctcaccggtcatccgcgccatgtaggcgccgttacgcagcgccccgttgacgtcgatcttcagcgtatcgtcgccgccctgaatggcgcgggcggccagcagcatccaggcctgttcctgcgtactggtatactttttgcgttcccattccttggcgacggccttcgccagttccggcacgatcggaggcaccggccggctttcggcggcgagcgcgaggatggctgcgccgtctcggagcaccgagccgtagtcggtgcgtgacaagttgaccttcgtgaccatcgactgagccgacatctgcagcgcatcgacgaagatgttcttcgaccgcgtcgcatcaccgtagagtgccagcgcggccgcgatgtgggccttggcgagcggtgtcgggaaatcgttgatcatcgtgtcggcgtagtaacgcagatcgctgaccgcggccttcttgttgcgcgcgagcacatagagcgcataggcgatctgatcgccctggtccttgacgttgacgtcatagctcaaggcgttctgcaggttctcgagtgcctgcgccagcgcacgatccggcacgtcgtatttctgctcgcgggcccgcgtcaggaaatcggtgacgtaggaatcaagccagagatcgccgctatccggcccccaaaggccgaaactgccggctgatgcctggtaggaaagaacgcgatagatggcatcctgcacgcgcttcttgatatcggcatcgccatcgagaccggcctgctcggcaagctcgctcagatagagcagcggcagggcccggctggtcgtctgttcggcgcagccgaagggatagcgatcgagcgacatcagcaatgccggaatgtcgaaggccgcggagcgcgtgacattgacgctgacggatgcgcccggaagaacgctatcggccaagagcgccttgtcgatcgtcagcttcgctcccggcttcagcgccagcacgcgacgctcggtgaccggcaacacggccggtcggacggggacatcaaggctctggtcgagcgatagccccgccgcattcgagatgttgaccgaaacgacaccgttgcccggctgcagaccggtcacggcaagcgtcaccgcctgcttcgcgccggcgccaagccggatcgtttgcgtggcctgcgcgataccgacagcgtcattgcctgtgaccgcaagcttgtagtcacctgcgggcgcatcggtattggcgatatcgagacgtagctcggacttgtcccccggcgccaggaagcgcggcaggctggccgtaacgacgacaggatcgcgaatgatcacgtcttgcacggcatggccgacaccggacttggaccaggcgaccgccatcaggcgtgccgtgccgttgaattggggaatatcgaaactgacctgcgccttgccctcggcgtccagtttcagtgggccggagaagaaggcgacgagcttctgcgtcggagggcttgcctgcagcgcgatcgcgccgccatcgccgccggtgcgcagcttgccggtggcaccgagcgagccgtcgatcaggcggccataaaggtcgcggatttcgaggccgagctggcgctggccaaaataccagtcctccgggttcggcggctcgtagcgcgtcaggttgagaatgccgacatcgacggcggcaacggtgacataggcctcctcgttggcgcccgcacccgcaacggcgagcgtgatcggcagcgggccgcgcggcagcattttcccaggtgcctcgatcttgacctgcaaggcccgatcctcgggatcgaccttcagccatttcacgccgatcgcgcgcatcggcatgtggctgtcctgggcatcgcccgggcggaacagcgtcgcagtcacataggcgccagcgccccagtcggcggtgacgggaatttcgacctcgccgcccttctcgccgatcgccgcattctgcaccgcgaccagcgtctcagtgccggctgcgatcatcagttcaccggcataacgcgaggaaaccttcagcttcgcggtctcgccgaccttgtagctatccttgtcgagcgcgatctccaggccatcgggcgtttccgtggacgttgcctgcacgaaccagccggcgtcgaattccacgcttgacgtcggcccatccgcgtccgtgctctcgacctcgaggcgataacggccccattgcacaggcgaggcgatcttggcgccgtcgatgccggcatcgacattgccgttgcccacctgctcggtggtgtagaccggctcgtacttccaggccgttccgtccctataccactggtaatcgcggtttagcttgaccagcttccagcgcagccccttcatttcctccttcacgccgtcggcatcgacgccgatgacggtaaagttggcgatcgagttctcaccgagatcgccggagaactccggcttgatgccgatcatcggcccctgatttttcaccggcagcacgagcgaacgctcgatcgcgcgccctccggcttcctgcattcggatgtagacggtcgcgttcagaagctgcgtcgtcgccggcagctcgcccaccgtcagatcagtgacgccttcgcccttttcatccagatcaggcagtccctcgatcgactggcgcgaatcctcgctcgcctcctcgtctgcgaggccgaagaagtagcccggaaacgcttcggcctgacgcgtcggcttgatgacgacatcgccttcaagcgtcagcccggcagcgggtgctccgtacagatatttgcccgagatattgatcgtcgccggcgcgtccggtccgatcatcttcgcctcggtcttcagctccatgtcggtccgatccggcacgaaatcgtcgaccaggaagctcttgctcgcgatcggcgatcccttcggatcggtgtggatgttcatcgtccaggtgccgcgcatggcgttgtcctgcacggcgaaatccacattgtagccgccgagattgctggtctggctgacgatgcgtcgatcttccacgccgtcgggacgcatgaagacgaaggtcagcggcagattttcgatcgccttgccatcggtatcgcgtgccagcgccgatacgcgaaccgtttcgccgacgcggtagataccgcgctcggtgaaggtgagcacatcgatcgcgccgggcgatgcgcggccggtgacgccacggtcggacaggtcgaaaccggcgcgtgtcatgtcgagaaagacgtagtccgacgcgccgttcttcgccgtgaccacggcaggtgtcagcgccgatgtccctcggatcaggccggcggtgaatgtcgcccgaccattgtcgtcagtcgtggccgcaccgagcacctcattgttcttggcgagaagctgcagctcgacaccggccatcggcttggcggtcgcgagcgagcgggcgaagacgttgaggccgtcggtcccggcataggtcgtcaccccgatatcggagaccacgaaccactgcgtcgcctgcgaattccactcttggtccggcccagtgggggacgtcgccgtcagcacgtaaacgccgggcttgcgctccggcagcgcctcgtcgacagggaagctggtgacgacgtccttgttcagatcattggcgatatcgatcgccccttgccagacaagttcaccgctctcgtcctcgatgcgctgggcgctgtagccatcgagctgggtgaggaactgcgaactggtcagcaacggcgcgataccacggtcgccgatgcggtagagcttgagattggccgaggccatattgacggaaacgatcggaatgccacggcgcgccgtcgacggcagcacgaagctgtcaccggtgaagcggacactcgcggtgcggtccttgacatagatgtcaaggctgacgggcgcctcgaggacttcgtcgacagacgagggaaggcccgtgcggaaagagatcttgtagttctcgccgtgcgtcaggccctcgacacagatctgcttgtccttggtctcaagcgccttcggcgcgacgccgttcagcgtcacgaagggtgtatagtccgtggtcttgaccagcgattccgagaaggtcacgcaagcgcgcggggtcgcgctgtcggcatcgaccgtgtggtccgtgatacggaagccccgcgtcgatttcagctgcaggaaggcggcctggacctctttcgaattcaccagcgccaggcttgccttataggcattcagcgcggcccggtagttcgagttgttctccagcgcgacggcaaggaccgcaagcgcatcggcgcggctggtcgtcgttcgcgtcaggtcgtagccattgatggcggccagcacggcctggggatagatattgctgccattgttgtcgtcgctcttgacgaagctgccgcccgcgcgcgccgtctccagccacaggtcggcattatcgggcgtgagcgccagcgcaccgcggaaggacttcaaggcatcgacgacattgttggccgtgaggtcgatgcgcgcgttggcgatcaggctgtcggccgattggccctgctggtcttcggcgacctcgagattggccttgtcgtcgcgcgcctgttgcaacacgtctctcgaaaggaagccgatgcgcggcgcggccccgaggtccggctcctggctgccggccgtctcgacgatcttcccggcgatggcgcccggaaaggcgttcatcgtcttgaagtcggatttgaggaagcaccagctgaccttggggttataggtgaaggccttgcacgacttgtcgccgatgcacgatgccttacactggtcgagcgtgacgttctgctcgctgcgcagatcgaagccgaaataatcggcatcgcgcacggtttgtatctcgcgcttgctgtcggcggaaaaggcgggtgaaccggtgagagcggtcgaaagaacaatggtagcggctgtcaagaacgcgcgtgcgaacataggttccccccaagatgctggcacctgatttggccgcaactctccccactcgcatcatcgttgtcaactcggatggagcgtcgcccgacagtaaatctcaatcatgtaacggtgacatcaaggccggcctccaatcgccgatccaacgcgcgccaagagaaggagaaattagcgttttgttaatgctaacaatatcttaactgaaaataaaaatgtcccgcgccggaacatatctcttgccgaaccgttttccgtcggagttctggtgaaaatgagtaacagggggccaagtatgggcaccggcgttgagtacagttcacagactgaaaataccaccaagcagcgtgtcctgatcgtcgaggacgaactcttcatcgcgcttgatctcgaggaaacagtgaaagcgatgggctttgacgtcgccggcttggcgaatagccgcgatcaggctctgcaactggcgagggacgccgacattgccttcgtggacgtcaacctttcggacggaccgaccggcccggaaatcggtcgccgattggtggaggaattcggggtcacggtggtgttcatgaccggcaatcccgaggcggtggcggacaagctcaacggcgcgctcggtgtcgtcacaaagccggcgatgccctcggccgtgcagcgaacgctcagaaaggcatcggaagtgcgccgcggcctgaactgaaaacgttacacgatcagacgaagccggatgaggagccgacaacggcacctcatccccgcatatacaacaagcgcatacgaaatcagatgagaccggtcatcaggccaattccagccagcgccgcggcgccgccagcggagcgggttacgacaacgcccttggtatcgccggcgcgtgcaatcccaaaccccatcgcaaggccaacgacatgcaatgccgccgtcgcgatcaggaacccggcggcgtaagccatgcccgccgcggcagccggcatttcggaaccatgcgcatgtccatggaaaaccgcgaacagaccgaccaggccggcggcaacggcgacgggggcacgaacaccgagcgcgacaatgacgccgagaacgatgaccgacaggccgattcccgcttcgacgaagggcatagcgatgcccatcatgccgagcgctccgcccacgcccatgacggcgacgaaggtggcgggcaccatccacacggcacgaccgccgagttgccaggcaacgacgccgaccatgaccatggcaaggatatggtcgagccccgacagagggtggctcaagccagccgcgaagccgaccgcttggccggtgcccatatgggcaaacgcaagcgatggcgaaagcaggagcgcggcaagcgcggtgttgaatttgatgcgcttcgaaaacatggcagtccccattgtcatatgcattgtggtgccgaaaatggcatggggactcagggcttcaaagcggaaaagcgaacaccaccgtcatttgacgtagatggatttcctggcgttttccacgatcaacgtggctgcaacgtgccgaaccacgcgacgagggcgatgaccgccagcccgagaacgacctcggcgacgacgcagaccttcagcggaagaacggagtgatgtcgggcgaaccgcgggacgaagacatagcggttgacgactgcaatcaccaccatcgctaccaccagcactatcttgacggccagcagacgctgatagctgaacgaccaatccgacggcagaccgccaaggatgagcagcgtgtttgcgattcccgaaagcagcacaagcgtgacggcgacatgtcccgctgtcgaaaatcgcatgagggccatacgcgcatcggcctgcggcgctccgcgcccaagcatcggcaggatcagcaataccggcacgagcgcgcccagccacgcccctgccgacaggagatggacaccactgttgacgcggtgcaccagccggagccagccactgttcatcgccgcgtggccactcagcgtcaggctgagcagcaagagcgcggcgcagacggcccgtcccctttgccgataggccgacggaagaaaggccgtggcgccaagcagaagcgcgccgccggcctggaccatccaggcatttccgacgtcagtctgcgtcattaccgcccagatcatctcaggtgtgaacagatctggccacccgtcgccgatgatcgccgtgcgcaacggcaggatcgccgcggtgctggtgatcgcgattgcgatcgcgaccgtgttcaaccacgacagcctgtcgccgacagcacgcgccagatcaggcgaaacgagcgcggcgagataggccgcgctcccccagatcaggatgacggcggcatcgaagagaaggcggcaaagaatgagggcagtgtccggcgtcacggcttgaccgtgaagccatagctgcccttcgtcttatgaccatccgtcgacagcacgcgccactcaacgacatatccgccggcatcgaggctctcgggaagaggcaccgtgagcgtctttccatcgtccgacagcttggcgtcgccggtcgaaatccgcttgccgtccgttccggcaatcgtcgcgccggaaaagcggatgttgagttcctcggaaaagtttagcgccaccgcggcgggagacgcttgtacgatggacttgtcggcgggaacgctcgacgtcaggtgcgcatgggcactggcctgcccggcagcacttatcatgatgatgaaggatgccgtgagcagcttgctcgttttaaacatgggattgctcattgaattgattttccgactggtgacgaccgtatgatctcgaccagctattgcggcatgggcatatcgcccattccggactggctgtccgttttcgcggcgccggcagcgccgaccgcgaattcgacatcaacctgaccggctttctcgaaagtcagcgtcgccttgatcgtttctccccgcttgaaaggctctccgacgttcttgaacatgacatggtagccgcccggcttcagctcgaccgtctgccccgccggaatagcaaggccgcccgcgaccggccgcatggtcatgactccgttgtcgacgctcattcggtggagttccgaagatccggcacgtgccgagttgatgccgacgagcttgtcgtcggtcgttcccttgttggtaatgctgagatagcccccgccgacttttgcgccagggaccatgggccgggcgtagggaccggtgatctctatgtcgcccgcggtgaccgtttgggcgcccgcggacgcgccgaaaaagagtgcaagaaagaaagccgtcagaacgagtgtaatcttcttcataatgatagttcctgccatagcgaccgctggttgccggacacgcgcatgacataggtcatgtaacgtcggcagcggacggttgtgtgggacatacgagataactttgcgggatcaccggttcgaaggtgatccacgcggcagatcaaacgcgaccgggattcaacggaggccccctgggaccgccagcgggtgacaagggcccgcttccgtcagcctcggtgccgctgcgcgggccgagactgatcgggatcgcaacgctgcgcaatgcgatggaaatcggagcgggcaacacgacagaggcgctgatccggcaagcctcgcagccatgcgcatcgactttgctctggtgatcccccgtttgcgctttgccgacggtacagatgactggcaccgttccatcaggcagcacatattcggacaattcaacggagatgaatgcgccattggcaaaggccggcgcctggtgcgcgaagcccaggaagaccagcgcaacggcgcagctgacacgcaccagccatcgaactatgcctgcctccgccgccttcacctgaacctccccgctcacttgcatcgtctttacgcaaaatggcggaaaatctcaatgcgacagattgagcagcgcccgaccgcgagcggcttgtgccatcgccttacggagcctgacgcacgcaacccggtcaggacggtagcgcttatggcggtagcagcccggtcaagggcttgagtgaatagagtccggtagcgacggcaccggcgcacctcgacgctgccggcccgagcggacgggccatgcttgccgagagtaatcgagaagccgatgctcacatccgagatcagccgatcggaaccgtggatttcaggatcagagtgtagctttgcggcccggtcgaactcgcgtcgatggccatcaaggcacgctgacctgcaattcgtggcgtccggaaaagcgcgaacgccgatgtgaagcacgccgctagttgtcgcaaagcatcgcgacgatcatcggctggcctgatcagcacctgagaccatcgaaacctgatcaaccggtttcaaggctctcagggaaggttgtgtcaccttgacgacgtcgcctggcaatagtgccgtcgattccgatgccgatatttcgtttgccgtgccgttttccctgcgcacgatggcgaacgtcaaggctggcttttccgcctggttcgccgatccgccgagagacgcgaggccatccaatacaagtttctggctcgtttcgcgcttgaccttcaattgaagaagcgtcgctctttcagattgaaggtccgaagcgacctccgtcttcctctcgtcgtagagcgcctgcagatcccgcgtcgtctggctgatgctctgccgggcgcgcatgatcgccgtgccgatgtccagccgggcgtcttgatagcttctcagcgttcgctcgacctcgccttgccgcgtcgccaccacggcgcccttggcaacgagcaccgcagtgctatcgacctgctgctgaatggatttgatgttggcatccatgctcgctgtcttctggtcgagaccgcgaatttctccgttgagcagttccttcaactcaccaagcgacttcgccttgcggtcgatagcattcgctctcgcgtcgaatatcacctgttcctggttgtagattgccgccgcgaacgggtcggacttgtcagcctgcgttagcagatccgccgtcttcgccccggtcatctcaacttccagccgggcgatccttgcattgctgcgcgtaatggaatcgtccagttccttgagcgcgccaaccagtctcgtgacctcgccggcaccatccagcgccgaagcgttccggaactcgccgccacccagcgccagtgcctgcaacacggtcaacccctggctgaacctgtactctcccggcttggacacatccccgacgacatataccggcgggtagtcgattatctgtacggtggtcgcgggcgcttcgaccagcccgatcttttccttgagacgtctggcgatctccgcagccaagccgctatcgtcgagatctccgacagcaacactgcccaggaccggaacggataccgtgccggtgtcggaaatcgtgaagtcgccgccgatcgatccccattgttcatagacgcctttggtcggcatccactgtacaacggtcagcctgatcttggtgtatggcggaaggggagcactggcggcggccccggcgaacatcgtcgttcccagcgcaaacagggtcagaaagcagcccagccgaaccggccgaccgcgccccatcgaaaaacgcatgcgttgcatgaacatgctcgctcattcctcaccgtaacccggaaacgctcaaaatactgccggcgcccaccgagtaattcctcgtttcgcatttggaaaatcggggcttcattgaattccgcaccgttattattcattatatcgaggcctgagatcaatatcccctgccataccaaaatagactagttgccatcatcctcccggcgattgagcgagcgacaaggcaacaccagcgcgacgccggatttatacacaaagcaacacttacatataaaactatattcgccatcgaatgcgcctcgatgtcatgccgaacggttgctggcgggatcgagctgcatgcaaatccgaggctggatgaactagcggccgccgtcgagcaattcaattgtgcgatggtcaaacacaccgccgtagaagcggtcgatcacccggtggaagggcgatccgtgatcgctgaccgcggcaaagagcgtcatcgacgaccgcagcttgcgatcgtcgggagagccgaagatgtcgtgcgcggatttcccatttatggacaagacggcgtcgacgcagcgcagcaggcgagcgccaagaatggcgtttgcgagataggccgttgcttcgccggccgagcggatggcatatttctccgccattggcgacgtgccgagaccggcgatctgcggaaagacgaaccacatccagtgcgagcgtttgcggccgctcgtgagctccgcaagcgctttatcatagacatcgttctgagcgtcgatgaagcgatcgagatcgtagtcgatatcatcggacatgatgccctcccccgactagaactatgtcgctcccggcatttctccagcttataaagaaagtctcagcaggacttgtcgggataggggctatgctcccggcagtagtccagcgccggtccggaatccgagatcgctccgacaggagagagatcgacagccgatgccgtcgaggtgttcatgtgcgcgacatatcccgccgcgccgagaaccagcaaagccgcaacgatgataaaccgctccgacaccgatggccggctggccgccttgatatgttccacgtattcgcgttcgcccatcccgttcaactcttcgtccgttgcatgatgatggaccgtgtcgccgcgaggggcgctccagctgtcgacatctgtcattgtcttgctcctgaaatccgcgcgacgatgcctacaacatccctcgacccgtagcgtctttcgcgcttacgttatgtgtggtgctcgcctcaaggcttgaaggccggatacggaaactcagtattcataaaatcgaaccaatcggtttgatccgactttaagggcttggctcttcgacggaattcggcttaggtcgggcatccatccagaccacggacactcacatgacaaaatcatttggtgcgatgtcgatcgcgcaactctccgttctcttccagagcggcgccgccgatccggtcaacgtcaccgaagcggtactcgaaggcatagcggcgcattccgaccagtcgatcttcaccgaactgctggccgaccgcgcgcttgccgaggccagggcatcctcggcgcgcctgaagagcggtcggtcgcgtgggttgctcgaaggcattcccgttgcctggaaggacctgttcgacatcaatgggcgcgcgacgaccgccggctccaaggtcctgcgttccgcttccgtggccaaggacgacgccgctgtcgttagcgcgctcggccacgctggaatgatcgccgtcgggcgcaccaacatgagcgaattcgctttctctggcctcggcatcaatccgcactacggtacgccgcacaatccacgcggcaaggatgagccgcgcattccgggcggttcatcctccggcgcgggtgccgcggttgccgcaggccttgtcccggtggcgatcgggaccgataccggcggatcgatccgcatccccgccgccttcaatggcatcgtcggctacaaggcgacccgcggccgctatccaatgggcggtgtctttccattggccaaaagcctggattcgctcggccccctctgccgaaccgttcaggacgcgatctggatcgacgcggcaatgcgaggcgtcaccgccgcgcccgccattaccccccgttcgctccgtggcgtggatgtggtcgttcccgacaatgtcgtgttcgatggcgccgaggcgggcgtcgttgccgccttcgagccaagcctggagtggctgatcgccgagggtgcgtcggtcagccgcgtcacgatcccggccttcgacgagatccttgcgctgatgggcaaatacggcagcctggtcaccgccgaagccttcgccctgcatcgcgagcggctctccggaccggaggccgatcagatggaccaccgcgtcgtgcagcgcacccgcctcggccagacgaccaccatgcccgactatatcgccattctggaggcgcgagaacggctgatcgccgaggtcaaccggctggtcggcgacagcttaatcgcctatccgtccgtcgcccatgtcgcgccacccatcgccgccctcgaggcagacgacgatctcttcttcgcgaccaacggcaagacgttgcgcaacaccatgctcggcaacttcctcgactggtgcggcgtttcgatcccctgcgggaccggcgacgcggatatgccggtcggcctgctgctttcggcaatcgccggccgagacgaggcgctgcttgccgccagcctttcggccgaagcaatcatcgcgggagattccgtttgaaattccaaggcgttgctgcctagatacggcggggcgaagaggaggaatggaatgatcgaggatatcgagaacggacggttcgccgtctctacgtggtcgctgcaccgggcgctcggcgcggtctacccctatagccccgacccggccagggacgcggcgatgcaggagccttacggcacaggcagcgtcgagctcatcgacgttccgcgccagcttgccgatcgcggcatttacaggctggaaatctgctcgttccatctgccgagcctcgacgcggattatctgcggcggctgcgggcagcactcgatcaatccggcgtcatgcttcagaccctgttggtcgaggatggcgacccgagccatcccgcaacggcgcagcgtgacatccgctggatcgccggctggatcgagatcgcagccgcactcggcgcgcgcaacatgcgcgtgatcgcgggaaagcagcagccgagcgacgagaacctcgcccgcgcctccggacatctgtcatggttggcggaacgggcagaagagagcggtatccgtgtcgtcaccgaaaactggttcgatctcctgccgtcgccgcgagaaatgaactggctgcttgacgatctccgcggcaaaatcggcctcaacggcgatctcggcaactggtcggcgccggagaaatacgccggcctttccgacatcatgcgccgcgccgagatctgccacgccaaggccaattataccgcagcgggcatggacaccggcgactatggcaaatgcctggacgcctgccggcaggccggatacgccggtccctacacgctgatctacgattcctcgttcttcgccgacgaatgggacggcatccttctgcagaaggcttttatcgaacaattccatcaagatgagcagcgcgccgcgggctgagctgctaaaggagactggcatgcctggttcaactgcgatcaacgatttttccaagcttctcaggagcggcgaaggcggtggtctgatttccgcatggatcggcatacccgatccgctcttcgtcaatcatctctcgcaggaagcattcgatgccgtcgtgctcgacatgcagcacggcgtctgggacatggtggctgccgcaaacggcattgggcagggcaggcttgccggcaagccggtggtggcgcgtattcccgtcggtgacttctcgaccgcgtcacggctgctcgatgccggcgcctcggggattatcgcgccgatgatcaattcggtcgcggatgcggatgccctggtcaaggcgaccaaatacccgccactcggcgaacgcagctggggaccgacgctggcgatgaaccataccggcctcgccgccacgacctacctggcgacagcgaacatggagaccgtcgcgatcgccatgatagagacgcgtgcggcgctcgaggccgccgatgacattctcggtgttgagggcatcgacggcatcttcatcggcccatccgacctttccatcgcgctttcgaacggcgcgcggctggcgcccgatacggcggagatggacgtcgtgctgaagcagttgctcgatcggtgccgcgtgcatggcaagttcgcgtgcatcttcggcagcaatggcgagcgcgccggacaattgctgaagatgggctttgatctcgttatcgccggcgcggacacgcagcagcttcgcgcaggcgccgcgaatgccatcgccacggcccgtaagggacaggcaggctgagctacttcttctgtgccagccagatgacgtggcgcgcgccgccacgttttccgttggcgcgcgaattgacggcctcgaccgcaaagccgctgtcgcgcacgcggcgcgtgaagccggcatcggggccggacgaccagacggcgagcacgccgccggggcgcaaagcgtcgcgcgcggccttcaacccgccgaagtcgtaaagcccatcattcgattggcgggtcagtccatccggtccgttgtcgacatcaagcaggatggcgtcgaatcttgcccggctggaacgaatgagttcagccacatctccctggtgaatgccgacgcggggatcgtcaaggcatcccttgaacacttcagccatcggccccctcgcccagctgacgacggcgggcacgagttcggcgacgacaaccgcagcgtccttcggcacgacggccagcgccgcgcgcagcgtgaagcccatgccgagaccgccgatcaggatgctcgggcgcggccgacctttcagcttatcataggagagcgtcgcgagtgcttcctcggaaccggagaggcggctgttcatcaactcgttcgatccgagcatgatggagaattcgctaccgcgctgcttcaggcgcaattcgccggcctcgccgggaatgggagcggaatcgagctggatccagggcagcatgtcttaggcctcgcgttgagccgccccactagcacaaaagatcgcgccagcgaaacgcaaacacgaggcccggagccaggctctcagccggatcactgtccgttgatgcaggccggattggtcgacttgcggttggccgcattgcgctgttggggcggacagcgtgtccactgcgccggtgccgaactcgtggtgctttcggtctcgaacgaatcgaggggaatggaaagaccgctcgactgttcgtccttcggacctgttccaagcggcgcggagccgtcgaaccggccactgctgtccatgcccatgttcatctgcgcgaacgcgctgccggcaaggctcatgatgacgacagaggtaattgcgagaagcttgcgcatgctggaaactccttcacgttcaataccatgaagaaatagcgcgcggtcggtcatgttccaaccgcgtgctaatacctatttcgcgcaggctcagcgcgccgcccagtttgcccctcggcggaagatggcgcgcatttcgggaacggaaaactccttggcctgatggccgagcgaggaatagaagacgcgccccttgccgtacttgcgcttccaggcgaccggcatcaccacgccatcgatccaataggcgtgatcgccggtaaacgtcgtcgtcgcaaggacttcgttggagggatcgacgtgcatgtaatactgctccgacgtgtagtcgaaatcggcaatgccttgcatgacgggatcgtccggcctgacgatattgacccggtaatcgatgatgttgccgggatgcgcgacccactggccgccgacgatgaactggtattccacgcagtcgcggaagctgtcgccggcgccgccgtgatagcctgcaagaccgacaccgccttcgatggccgccgcgaggttcttgatctcttccttttcgatcttcgacatcgtcacgatcggcacgacaagggaaaggtcgtgaacggatgggtcggcgaaagcctcggtggtatgctcgacatagaccttgaaaccgtcttcctcgagcatgtccttgacgatggcggcgcattcctgcggctcgtggccgctccatccgccccaaacgatcagtgcttcacgcataaaattttctcctccatcattacttgcccagacgtccgtcgacgagggattccgagatcggcgcaggccgctccgtctgcgtggtgatcgtcacggtacggccggtttccgatgcggtctggaaggcttccatgacctccagcacatgcagcgccaggctgccgttcgcgcgatgcggccggttctgacggatcgcataggcgagatcggcgacaccgatcgaccggtagtttccatcggcgtaaggcgctgtcagcggctggctttcgaacgacccgccctttcgcaagagctcgacttcgccgccgaaatgattgggatccggcacgatcagcgttccctcggtgccgtagacctcgagcggtacgtgcttgtggccggcgacatcgaagctcatgccgatctgcacgaccgcaccattggcaaaggccatcaggccggacacatgggtcggcacatgcacggggatatgctcgccgtttcgtggctcgctggtgatgacgcgctccttgcgcggcgtaaccgcgaagcccgcgacctgcgccaccggcccgaacagattgaccagatcggtgatgtagtacggtcccatatccagcatcggaccgccgccgacctcgtagtagaaggcgggattggggtgccagcgctcgtggccggggcacatgaaagtggcggtgccgcccactggctggccgatcacgccctggtcgatcagcgcccgcgccgtctggtggccgccgccgagaaaggtgtcgggcgccgcgccgatgcgtagccccctccccttggccgcttccgccagctgcttgccttcggcgaagttgatgccgagcggcttttccgaataggtgtgcttgccggcggcaagcgcctgcaggccgacggcgacgtgcgccttcggaatggtcagattgacgatgatctcgaccgacggatccgcgaagagcgcatcgacgcttctggccggcacgttgaactcggctgcctttgcctgcgccagttcgctgttgagatccgccacgcccctgatgtcgagaatggggaaagacgccatggccttcaggtacgcgcccgatatgttgccgcatccaatgatgcctatgccgactttatccatgatttcctcccatagattttggttctgaaagcctcagagcgccgggccggttgtgttccacggcgactcgtaaagttcataaagggccacggccgcggccccctgagcccagaagtcgtcgctggaatcatcgaagacgagttccgcgacgcccttcagcgagggtggtatggccagcgcatacgcgctgcgcaggctggccaggaaatgctctccaagcgcgaggctggaccccaccaagatcacgcgcggcggcgcgaagagggtcacgatattggcaaccgcgacaccgacggcctcccccgcccggatcgccgcgctgatcagcgcattgtcctcggccttgatcaaagcctgcgcgtgcgccatgccgcgtccgaggcggatcgcctcggcaaaacgtccgcccgccggctgctcgccgagaatttcgctttcgcccgcctggctcgacaaccgcacgatcccgagcggccccatgcccagcacgagatcgccgagattgtggctgagaccaccggcgccgcgaaacagctggttgccgtggagcacgccgagccccagcgtctgctcgagcgagatcagcaccatgtcttccagatcgcgcgccttgccgaaccaatgatgtgccagcgtgatcgcatgcgcgtcgctttcgacgatcgtcgatgtgttcagccgtgcggtcatctcggcggcgaaatcaacgttgacgtcccggaagatcgggctgctgcgaatgtggccggtgcgatgctcgatgacaccgggaaggctgaggcagacgctgtcgacatcttcaagcgacagaccggcatcgacgacacaacgccgcacgccgtcctcgaccagatcggcgatgacgccgatcggctggcgatcgatccggatcggcagagcaagcttcgagagcacgtcgccgcgaaaatcggtgacgacgaagaccatgcggctggccgcgatcttggctcccacgacacgcgcagcatcgggattgagctccagcatgacacgcggccgtccccgcgccgcttcgttgcggatgtcgccttcatggcgcggcaggatgagcccgtcgtccaaaagcgaggcggtgatggccgaaaccgtggtggtcgacagttgcgtgcgttcactgatctcgacgcgcgcgatcggcccatggcggcgaaccgtgtccagcacgttcaggcgattgatcgcacgcatcaattcggggtctgcggtcttcatctatcgtgcacggctcttctggcgaccgccgaagcagcgcgttatttttgtcggaatgcgaattaaataacgtggagattcagccctctgtcaaggcgaatctgccaaattcgcccaagggagttgacattcttgcaaagctgccgatcatttattccgcataagggacaaaattgtagaggacgattttcccttgaggaggagaccttatgttcaatgatcaaagggcgaaagccctgctcaacagccgcgcctttgtccgctcgaccgcgaccgccctggcacttctgatcgccgctggcagcgccatggccgagaccacgatcaagtggatgcatctcgagatcgatccaacctatatcggcgtctggaaacagatcgtcaagaattacgaggccgagcgtccgggcacgaagatcgagatgcagtttctcgaaaacgaagccttcaaggcgaagctgccgacgctgctgcagtccagcgacgcgccggatctcttctacagctggggtggcggcgtgctgaaacagcagctggcgacgggcgcactgcttgacctcagcgaggcgatgaacgccaaggatggcgcatggctgaagacctacaatcccgcctccgtcaagggccttacctatgacggcaagatcggcgcggtcccctactccgtcggcacggtatccttcttctacaacaaggcattgttcgcgaaggcaggcgtcgacgcgaccacgatcaagacctgggacgactacctagccgccgtcaagaaaatcaaggatgccggcatcgtgccgatcgccggcggtggcggcgagaaatggccgatccatttctattggagctatctggtgatgcgcaacggcggccaaaaggtcttcgacgcagccaagaatggcgagggtgaaggcttcaacgacccggcgatgatcaaggccggcgagcagctcgccgaactcggcaagctcgagccattccagcccggctatctcggcgccacatggccgcagacgctcggtgtcttcggcgacggcaaggcggcgatgatcctgggcttccagaacaccgaagccaaccagcgcaccaattccggcgacaagaaaggcctgagtgccgacaatatcggccgcttcgccttccccgcagtcaccggcggcgcgggcgcggtcaccgacaccctgggtggcctgaacggctgggcggtgacgaagaaggcgccaccggaaacgctcgacttcctcgcctacctcaccaatgccgagaatgagcggaccatggccaaggccggcatgatcatcccggtcgcggtcggcgccgaggatggcgtgaccgacccgctggtgcatcaagcggcccagcagctggcgggctccacgtggcaccagaacttcttcgaccaggatctcggcccttcggtcggccgcgtcgtcaacgacgtgtcggttgccatcgtctccgggcagatgacgcccgccgatggcgcccagcagatccaggacgccttcgagcaggatcagttctgatcgagaccatcgcggcgcgggacaggatctcgcgccgccatttcatgtcaggaaggtgaggtccccatggccaatgtcagcgccgccaccacgatcagacccgcgcgcataccggccacccagtccgcccggcgcaagcatccggccgtatccggccgcctgcccgtgctgctcctcttcctgccgccggccctcctgctgttttcgatcttcgtgatcctgccgatgggggaagcggcctggtacagcctttacaaatgggacggatacggcctgccgacgcaatatgtcggcatgcgcaacttcgagcttctgttcaagaacggtgctttccttaccgcgctgaaaaacaacgcgatgatcatggtcatctcgatcgcgatccagataccgctcgccatctggctggcgatgatgctcgctcaccgcattgccggcgtggtcgtcttccggctgatctttttcctgccctacgtgctcgccgacgtcgcggccggcctgatctggcgctttgtctatgacggcgattacgggctcttcgcctcgatcgccggcctgctcggcgtcgcgacgccctatgtgctggcagacaaggatctcgcgatgtacgcggttctggccgtgatcgtctggaaatacttcggcttccatatgatgctgttcatcgccgggctgcaatcgctcgacaagagcgtgctggaggccgccgaaatcgatggcgccagcggctggcagcggttccgctacatcaccctgccgcttctcggatcgaccgtgcggctctcggtgttcttcgcagtcgtgggttcgctgcagctgttcgacctcatcatgccgctgacgggcggcggtccgttcaacgccacgcaaacgatggtgaccttcctgttcaacttcggcgtcgcccgcatgcaggtcgggctcggaagcgccgtcggcgtggtgcttttcctgatctgcgtcacactcgccttcagctacaaacggatattcatgcgccatgactgacgtcgtttcatccgaccggctcaatgccggcaccaaggcctatctctatacctcgctggtcatcatatcggccatcgtcctgatcccgctggtgaccacggcacttggcggtttcaaggacctgggcgacctgcgcaccaatccattcggcctgccggtggagtggcaggtcaagaactacaccgacatcttgttcggcgatcgctactggcggcagatggccaattcgctgctcatcgccgcgctgaccgtctttctcaccgtatcggtttcggcaatggcggcctttaccttcgcgcatgtccgcttcttcggcgccgatttcctgctgaactacttcctgatcgggctgatgtttccagccgccaccgccattctgccgctcttcatccgcatccgcgatctcgggttgctcaacacatattggggcgtggtactgccgcaggtcgccttcgggcttggcatgagcattctcctgttccggaattattttcgcaaccttccggaggaattgttccaggcagctgtcgtcgacggctgcggctacatgcgcttcttctggcatatctgcctgcctctctcgcgaccgatcatcgcgacggtcagcatcatttccttcgtcggcagctggaacagctacatcctgccgctgatcatgctgaattccgagaagatgtatccctggccgctcggcatcatggtctatcgcggcgaattcggcaccgcctggcagctggtgctcgccttcatcacgctgaccatcatgccaaccgtaatcgtcttcttcctggcacaaaaacacatcatcgccggcctgaccgcgggcgcggtcaagtcgtgacgttcagccgacggcgtcagccaaagacaaggccgccgtcgacgatcaggttctggccggtgatcgcccgagcccaggggctggcgaagaacagcacggcgtcggcggcctcctccggcgtcgtcacgcggcgcagcggcgtgctgccggcgatgagatcgaataccgactcgggcgttgcggcgctggcatcggtggtccgtagcaatccaccggagaccatgttgacggtgatgccatcgggtccgagctcagccgcggcggtgcgggtcaacgccagcaacgcgcctttcgccgccgtatagtcgtgatagggcacgacggggttctggaagagattggtcccgatcgtcacgacacgtccgaagccggcagccgccatggcagggcgcgttgcctggatgaggttgagagcgcccttcaccgcggtatcgagctgcgctgtcatcgcttcccagctgagctcgccgagtttcaggcgcgcgtcgccgttgaagctgaaatcggcgagcgcattgtgcacgaccgtcgtcggcggccccagcctgcgcgtgacatcggccagcatttcgctcacggccgcgccgtcgcggatatcggcctgaaacgcatgcgcccgttcgccgaggctttccgccaacgcctcggcctgttcccggctgttgcgatagttgatcgccaccttcgccccctcgcgggcaaaagcccgggcgatcgccgccccgagcccgcgcgctgcgccggttacgatcaccgtctgctcactgagcggcaatgtcatttcgcgtatccttcctctgtcgtccaaagtgcgtgaaagtgctggaccgggccatgtcccgagccgacgtcgagcctgtcggccgcggccaccgcgccggcgagatacgacttcgcggcggccaccgcttgcggcagcgccacgccgttggcgagctccgccgccagcgcgctcgacagcgtgcagccggtgccgtgggtgtttgccgtcgggatcctgacggcctcgaaccaggtgagaccatcttccgttgccagcacgtcggggctctggtcgcccccgagatggccacctttcacaaggacggcggctggacccagcgcgcgcagcgcctcggcctgctcgcccatctcccggcggctcttggccacatcgatgcgcagcagcgcggccgcttcgggtagattgggtgtcagcagcgtcgcaagcggcaacagccggcgcagaaggacatcgacggcggagggatcgagaagcttcgccccacccttggccaccatgaccggatcgagcacgatcgggatatcaggatgaagctggagcacgtcggcgaccgcatctgcgatttcggcactggcgatcatgccgatcttgaccgcatcgacgcggacatccgcgaacacggcctggatctgatcggccacgaagccgggcgggacaaggtgaacgccggatacgccccgcgtgttctgcgcggtcaacgcggtgagcgtcgccatgccatagacgccgcgcgccgcgaatgccttcaggtcagcctggatgccggcgccgccggatggatcggagccggcgatggagagagcattccggatcatcgcgacctcccctggatagcctctgatagctcgcgggcggcaccgtgagggtccgatgttccacagatcgccgagacgacggcgatcccatcggcgccggcggcaaaaacaccgctgacatgcgccagcttgagcccaccaatcgcgaccgacggaaccgggcagacggcggcgagacgcgccaggccgtcgaacccgatcggcggcttgtggtccggcttggtctgcgtcgcgaagaccggcccgataccggcatagtcgaccgatgcgggatcgacagccctcgccaggacctctgtctccaccgacaggccgaggatcatgtcaggcccgatccgctcgcgcgcggcgcgcacgaccatatcgtcctggccgacatgcagcccatcggcgccgatcgcgatggccgcatcgacatcatcgttgacgacaagcagtgcaccggtgccggcgagcgcttccttcagaacaaggccggtctcgatcatccgcgcggtggaggcggtcttgtcgcggagctgcaccacggtggcgccaccgtcgacggctcgccttgcggtttcgaccatgccaatgccggcgcagagctcgggatcgaggacgagatagagcgatagatcgatccttctcatagcatccgcacccgtgcatttttgtcgacggcgatgccgtcgatcgcagcgagggcgtcgaggaaccgccaggaaaatgatcccggcccgtcagcgacccgcgccgcctcttcgccggcgacggcgaacagcgcgagcgccgcgactgtcgcctcgaacggcgcatcgggccggctggctgcgaaggcgccgacgaggcatgtcagcgagcagccgagcgccgtcacctgcggcatcagcgatgagccgccctcgatgcggcagccgcgcgcgccgtcggtcacgaaatcgacctcgccggtgaccgccacgatggcgtggtacttgctcgcgatttggcttgccgcagcttcggcctgttccacggggtcacggctgtcgacgccatgcccccggctttcgccaccggcgagcgcgatgatttcggacgcgttgccgcgaatgatggtcggacgaagcgccaacaggtccgcgacggcccgtttgcgaaaagcggtcgcgtagtgcgcgacgggatcgagaacccatggcctggcgctggcgcccgccgatgcggcggcggcgcgcatgccgttcatccagctcggcgagagcgtgccgatgttaacagtcagcgcgccggagatggccgcgaactcgccggcctcttcctcggcatgcaccatggcgggcgaagcgccggctgccagcagcacgttggcggcgatattcatcgcgacgaaattggtgatgcactgaacgagcggctttcgcgcgcgcatggcatcgagcatagaaccgggagatctgtcgtctttcatcatgcccctttcgggcggggcaagacgcgggaaccctgatagcaatgccgaagggtccgagcgactccctccgccagcattatctggttcaggttcgaagggtacttctcagtctgccgtcggcaaacgcccctgtctctcaatggctctgttctgtcagagaagacgattgctgtcacgcgtaaaatgatggcggctcaaagccgccggtcaggcgccgttctccttgatcgcttccattgcaacgaaggtcgacgtgttggcgacgaagggaagactggagatcttttcccccagaacgaggcgatagttggcgatatcggacgtgcgtatcttcaggagatagtcgaatgcgcccgcgatcatgtggcactcctcgacttcccgcagcttgcgaaccgcgacgttgaacgcgttcagcgcattctccctggtatcggagagtttcacctcggtaaacgccacatggttgcggccgagcttgttgacgtcgatgatggcgcggaagccgagaatatagccatcctctatcagccgcttgagcctgacctggcagggcgtattggaaagacccacgcgcttggcaaggtctgtcaccgacatccggccatcggcgacgagcgcgtcgagtatgcgctgatcgaattggtcgatttccctgatatttccggcgctcatcacaagaattcccctccgcacgaatattgattagcgcgttagataactaaacgctcgaaatcaagtgaaattgactttctgaaatctgctagcttcgcgacattggcggatcaggagcccagcatgacaaacaccaccgacgcggtagcggccgaagtcacactagagcaggcaaacggctctgcaaatccctttgacggtttcgccccgccaatccgccagcagagcgacctgcgccgcgcgatcacggccgcctaccgcacgccggaaacgatctgcgtgccacgtctggttgaggccgccgcccttcccgatcacgtcagaaaggccgctgccgacaccgcccgcaagctgatcgaggcgttgcgcgccaagcacaagggcaccggcgtcgagggactggtccacgaatattcgctctccagccaggagggcatcgcgctgatgtgtctggccgaggcgctgctgcgcattcccgacacggccacgcgtgacgctcttatccgcgacaagatttccgagggcgactggaaggcgcatctcggcggcggtcgctcgctcttcgtcaacgccgcgacctggggcctcgtcgtcaccggcaagctgacatcgaccgtcgccgaccgcagcctttcggccgcgctgacccggttgatagcccgctgcggcgaaccggtgatccgccggggtgtcgacatggcgatgcggatgatgggcgagcagttcgtcaccggcgagaccatcgacgaagctcttcagcgggcgaagccgctcgagcagcgcggcttccgctattcctacgacatgctgggcgaagccgcgaccacgggcgccgacgcgaagcgctactacaaggattacgagaccgcgatccacgccatcggcaaggcgtctgatcgccggggcatctacgaagggccgggtatctcgatcaagctttcggctctgcatccacgctacgcgcgcgcgcagagcgcccgcgtcatggacgagttgctgccgaaggtgaaggcgctggcgctgatcgccaagtcctacgatatcggcctgaacatcgatgccgaggaggccgatcgcctcgaactgtcgctcgatctgctggagacgctctgtctccaccccgatctggagggctggaacggcatgggcttcgtcgtgcaggcctatggcaagcgctgcccattcgtgctggatttcatcatcgacctggcgcgccgtgccggccgccgcatcatggtgcgccttgtgaagggcgcttactgggatgcggaaatcaagcgcgcgcaggtcgatggcctcgcggacttcccggtgttcacccgcaagatctacaccgacgtttcctacatcgcctgtgccaggaagcttctggcggcaaccgacgccgtcttcccgcagttcgcgacccacaacgcccagacgctggcgaccatctaccagatggcaggttcggactattatgtcggcaagtacgagttccagtgcctgcacggcatgggcgagccgctttacgacgaggtggttggccgacagaacctgaaccgcccctgccgcatctacgcgcccgtcggcacgcatgaaacgctgcttgcctatctcgtgcgccgcctgctggagaacggcgccaactcgtccttcgtcaaccgcatcgccgatcctgaggtttcgatcgaagacctgatcgccgacccggccgagatcgtctcgaagatgccgatcgccggacagaaacacgacaagatctcgctccccggcgaactatacggaaaccgcatcaactccgcgggcctcgatctctccagcgaagcggtgctcgaccacctgtcccgtctcctgggcgaaagcgccgcggagggctggcgcgcgctgccgagccaggcgaccgatatcaacggcgcccgcgacgtgctcaaccccgccgaccaccgggacgtggtgggccaagttcgcgaggcaacgccatccgaagtcacggccgcgatgcaggcggcgcaggcggcagcggcatcctgggccagcgtctcgcccgccgaccgcgcggggctcctcgacagcgcggccgatatcatgcagactcgcatggaaacgttgctcggcctgatcatccgcgaagcgggcaagtcggtacagaacgccattgccgaagtgcgcgaggcgatcgacttcctgcgctactacgccgagcaggcccgccgaacgctgggcccgtcgcacgcaccgctgggacccgtggtctgcatcagcccctggaacttcccgctggcgatcttcagcggccaggttgcagccgcgctcgttgcgggcaatccggttctggcgaagcccgccgaggagacgccgctgatcgccgccgaagccgtcaggatcctgcatgaggcgggcgttccgcacgatgtcgtgcagctggtccccggcgaaggcagcgtcggtgcggcgcttgtcgcggcgccggaaacggcggccgtcatgtttaccggctcgaccgaagttgcccgcctgattcaggccgaactttccaagcggctctcggccgatggcaagccgatcccgcttatcgccgaaaccggtggccagaacgcgatgatcgtcgattcctctgcgctcgccgaacaggtcgtgggcgatgtcatcgcatcggccttcgatagcgccggccagcgctgctccgcgctgcgcatcctttgccttcaggacgatgtcgccgaccgcacgctgacgatgctgaagggcgcactgcgcgagctgacgatcgccaacaccaatcgcctctccaccgatatcggtcccgtcatcaccaccgacgcgaaggagatcatcgagacccacgtaaagtccatgcaggcgcttggccgccaggtcgaacgcatcgagctgccgacggagacacagcatggtacgttcgtcgccccgacgatcgtggaactcaacaacatcgcagagctgaagcgcgaagtgttcggccccgttctgcacgtcatccgctggcgccggcaggatctggaccggctggtcgatgagatcaacgccaccggctatggcttgaccttcggcctgcacacacgcctcgacgagaccattgcccgcgtgacttcgcgcatcgaagtgggcaacgtctacgtcaaccgcaatgtcatcggcgccgtcgtcggcgtccagcccttcggtgggcgcgggctttccggcaccggccccaaggccggcggaccgctctatctcggccggctggtgaagaccccaccgatcccgccgcagcacagctcggtctatagcgatccggcgctgtcggatttcgccaagtggctcgacgaacaccaacggcatgacgaggcggagatggcccgcaatctcggcagccagtcggctcttggcctggagagcgagctcaccggccccgtgggggaacgcaacatctacgcgctgcacgcgcgcggcaccatcttctgcgcaccggtctcggaagtggggctgcatcgtcagatctcttccgtgctggcgaccggcaacaaggcgttcatcgaatgcagcgacagtcttcgcggcagcttgaaggatcttcccgtcagcgtttcgcagcgcattgtcttcggcaatggcaggagcaccaacgaaaccctctcgggggcgctcatcgaaggcgacagcgcgcgcatcgcctcgatgcagcaggaaatcgccgccatgtccggcccgctgctcctgacgcaggccgcgtcgacggcggaggtggagcgcaatccggaggcctattgcctcaactggctgctggaagaggtctccacctcgatcaacacggctgccgccggcggcaatgcgagcctcatgtcgatcggctgatcttcctgagctgcaatcacgtcacgcgacgtcgcgtgacgtgattgattgtgcgccacaatccgaaaccgcgtgacattcctgttccgcgttcctaccaatggagcgaagcacggaacaggatcgaccaatgaccggatcattcaaccagcccatcgatgcagccgaggtcccgcgcttcgcgggtcaggcgaccttcatgcgcctgccaaccgccgacacggcaaaggggctggacatcgcactcgtcggcatcccctgggacggcggtacgacgaaccgggccggtgcgcgacacgggccaagggaagtgcgcagccagtcgagcctgatgcgccgggtgcatcatgtctccggcaccgagccctacagcatcgccaatatcgccgatgtcggcgatctctccgtcaatccgatcaatctgatggatggtctgagccgcatcgaggcagggattgccgagatcgtcgccgctggcgcgatcccgctctcggtcggcggcgaccacctgaccacgctgccggttctgcgcgctgtcgccaaggctcgccccgtgggcctcatccatttcgacgcccattccgacaccaacgacacctacttcggtgacaacccctatacgcacggcacaccgttccggcgcgcgatcgaggaaggcttgctggacccgaagcggatcgtccagatcggcattcgcggttcggtctatgagccctcggagcatgattgggcgagagcgcagggtgtgcgcgtgatctacatggaggagttcgtcgagcgtggcgcgaaggacgtgatggcggaagcgcgccggattgccggcgaccagcccacctatgtcaccttcgatatcgacagcatcgacccatcgatggcgccgggaaccggaacgcccgaggtcggcggctttacgacgcgggaagcgcagcagatgatccggctgcttgccggcgtcaacatcgtcggcgccgatgtcgtcgaggtcgcgccaccattcgacgtcggcggcatcaccgccctcgccggcgcgacgatgatgttcgaactcctctgcgtcatcgccaaacaggtggcggacaaacgctgattagctctccggccgggcgctcaagttcccggccagtctcctgtagccgccgcgccagtagagcaacggctccacgtcctcgcgcgtctcgatcgcgcgcacgcggccgatcagaatggcgtgcgaatggtggttgagaaccgtgtccagatcgcagtcgagcaccgtcagagcgtccgacagtgccgcggtccccgtcgctagctcatgccattgcgcgccctcatagcgctcggcgccgcgacggccatcgaagccggcgaaggattgcgcgacgtgctgctggtcggcggaaagcacattgacgcaaaagcgacgatacttatcgacggcgggccatgaggaggacgaccgattgacgctgacgatcacggagggcacgtcggcggagagcgatgagaccgatgtcgcggtgaagcccgtccgctcgtctccctctccgaccgtgatcacgctgacggcgccggccagatgccgcatcgagagcttgaacgccgtttgatcgacgacaggtttgtgcagcatcgccagcccctcattctcggcttttcgcgaagcgattggcgggcatcgagaggccgaggttttcgcgaagcgtcgcgccctcgtactcctcgcggaacaggccacggcgacgcaattccggaagcacgagcttgacgaaatcatcgaggctcgccggcagcgtcgggaacatcaggatgaaaccatccgccgcccgcgtctcgaaccactcttccatgaaatcggcgatctgcttcggggtgccggtgatgccgttgccggtgtgcttttcggcataatggcgcaccagttcgccgacggtgcggccgctcttgacgaaatcgacgagctcgtcgaacagggcgcgcgatcccttcggcgcttcaggaagccggtccatggggaacggctggtcgagcggcacgccggtcagatccgcctccaggaattccgacagcatcagcctgccgacatccgggtgcatcttgtcgatcagataatcgacctttgccttcgcctccgcttccgtctcgccgacattcaagacgacgccgggcatgatcttcaggtcatcgggattgcggtcataggccggcatccgcgacttgacgttctggtagaaggcacgattgcgatcgatgttcgacgccagactgaagacgatttccgccgttcgcgccgccatgtccatgcccggttccgagccgcccgcctgggcgatcacaggccggccctgcggggagcgggctatgttgagcgggccgcgcacctggaaatgcttgcccttgtgattgagcgtgtgatgcttggtcttgtcgtagtagacgccgctttcgcgatcgagcagcagcgcgccctcctcgaagctgtcccacaggccgaacacgacatccacgaattcgttgccgcgctcgtagcgcagcgcatgcggatcgagaccttcccggttgaagttatagccggtctcgtcatgatccgacgtgacgacattccagcaggcgcggccgccgctcaggtggtcgatcgaggcgaacaggcgcgcgacgttgaatggctcgtagtagctggttgatacggtggccaccagcccgagcttctccgtcgataccgcgagcgccgacaaaagcgacagcggctcgaagcggttcatcttggtcggaatgcgcgacagcgcatctggatcgccgacggcggcggcgggcgaatccgccaggaacatgaagtcgagcttcgctgcttccgagcgcttggcgacgtcgagaagatggctgaaattgttggcgccgtcgacgttgctgtcgggatgcagccaggaggccggatgaaagccgaatgtgtagacgaacgtgcccaatttcatcttgtcgccgcgcgccatcgtcgtctcccaaaagttgaccgccatcaattgcgcaagctaacgccacgcgacttttttcatcaatatcgcgcagctatcttccgttttagtttttctaaagagtcgattgtgccgagacctgcccctgctgtcgcgagagcgcgatcatccaatcgcggaactccggcccataggccctttgaagcgccgatcggtcccaggccagaaaataactctcgcgcagtgggatgcggatatcgacaggaatgacgagcgtctgcgcctcgagttcatccgcgatcatcgacatctgcgcgagcaccacgccgcgcttgttgaccgccgcatcgatggcgctactggaaagcgtaaaggagagcccgggtgtcgtctccttaagatcgacgccgaccttcgaggcgaattccgaccagcgcggatagggcgtgaaatgccgctcccactccacatgcagcagcggatagcgcaacaactccgcagccgtcggcctgcccgctgcgatcaatgccggagagcaggcgggaaccacccagtcgcggaagagctcggtgtaatgatcgtgctgcagcacgtcggagccatagctgacgcgaaaatcgacctcgtcgaaccccatgcgcggctcccggtcgcggccgatgacacggatatgggcggccgggtgaagggcctgccagtcgaaaatgcgccgtccgatccacttgttcaccaccgaggacagggcgctcaacaccagcgcattctcgtttcgcgcacgctccagcacctgctgcgcgatcgcgaactgctcgaagcccttggtgatctcgcggtgataaaggcggccccagaccgtcagctccgcggtccggccgctgcgctccagaagtgttacgccgagaaagctctcgatcttcctgatctgctgactgatcgcacccggcgagacgttgagctctatcgccgccgccgtgacgctgccgcaacgcccggccacctcgaaagcctgcagcgccttcagcgggagcgccctgaattgttgctcatcggtcaagtcgggcctcgtcagggttggcgccgcgagcgcttttcagccggctggaagacgctcgcgaactggaatcgatcgccgggatgcatgatctcgacatgcgtcaccatacgctcgttctgccacgtctggcgaatgagattgaggcagggctcgccacgctccatcaggagcacacgcgccgtcgatgcgtcggccgagaccgcccggatcacatgtctcgccttcgaccatggcacctgcgacaacagccatttcgccggcggggcgccagcaaagctctcatctcttgcgagcggcaccgtgtcgagcaggatcagccggcgctcgatggcgatgggctttccgtcaacgatgtgcaggcattgaagcctcagaacctccgagccttcgggcgcctgcagctgcgccgcctcggccgtgtccagccgttcgatcttgcgcgacaggatttcgtgccggtgctcgtatccggcaagggccgcctcggtgcttatatcctggatatccatcaccgtccggtcgatctgcggcgaggcgacgaaggagccggccttgcgtcgacgcacgatcagcccgcgctcgacgaggatggctagcgccttgctgaccgtcatgcgcgagcactgatattgctccacgagatcatgctctatggggatgcgatctccgggccgccagtcaccactcagaatcctcgcctcgatgtccttgaaaattcgctgatgaatcgcgcccaatacgtcacctttcctccggcgggagacagaaatccgcgaataccgatccggccgccgcttatccctggcacacgtgcccggcacaaaaattgctttcctggagtttggcgttgacacactaggccagcctatatctatttgtatagtcaaaagcggaccagagaagtgcgctcaaacgactaaaaaatcgggaactcgtgctcctccaccgggggagcaaacactggagagaatgaagatcatgatcgcaaactcattgctcaagggccttgtcggcgccgcattcctgttcggcgcaacgctttccgcgcacgccgctgatacgcttgccgccgtcaaggcagccggcacgctgaaggtcggcaccgagaccgccttcgcgccgttcgacttcatcgatgccggcgagcacgcaggcctcaacgtcgatctcttcgccgaaatcggcaaggaactcggcgtcaagatcgagtgggtcgcccttccctgggatggcgtcttcccggcgctcgaagccggcaagttcgacgtggttgccggcccggcaacgatcaccaagaagcgcatggaacgctaccgcttcacgccgccgatcgccgaagcaacgatcgcgatcctgaagaaggccggcgacagctcgatcagcaagcctgaggacattgccggcaagaagatcggtgtcggcaaggcgacctcgcagctcgatcagctgaaggagttctccgatacgctggcgaccaaggccgacattcgcgaatatccggccttcaccgaatcctacgccgacctcgccgccggccgcatcgccggtgtcgccaactcgctgccgaacatcgccttcgtcgccaagcaacgcgagggaaccttcgaagtcgttcagccgcctttcggcaagaagtcctatttcggcttcatcggcctgaaggatgccgatcatgcgccgctgatggacgcgatcgacggcgccctcctgaagatcaaggctgacggccgcatggccgagctgcagaagaagtggttcggcgccaccttcgatacccctgacgcggtcaaggacccggcgttctgattttacagaccagcgatcgatcgcgctccggcgataccggggcgcgatcaggttttgtgagcgccagacaggctaaagccacatatgtccctaaaactcttcgaattgcttctgcaggcgtcgatctacacggtgacgattagcgtcgtgtcgatcctgatcggtttcgcgatcgccatcgggctgtcaggcatgctcctgtcgaagaagacgcttttcgttcttcctgcccaagttttcatcagcttcttccgtggcgtgcctctgctcgtccagcttctgctgatctacaatctgctccccgccatcgggctcaacgttccgagcatcgtcgcggcgatcgccggtatgtcgctctgcaccgcagcctatcaggccgagaaccttcgcggtggctttgccagcgtatctgtcggactgattgaatcggccgagatggtcggcatgacaccgggccagatcttccgccgcatcaaggcgccgatcgcgctccggctgacattcccggccctcgtcaacgaagcaatcctcattctcaaggcatcgtcgctggtctcggtggtcggcatcatcgagttgacccgcatggcgcaggatcttgccggcagcaccttcctgccgctgcagatcttcgcggccgcgggcctcatctatctcggcatcaactggatcgtggcgattgccggcggtctgatcgagcgctccctgccgggagttccgcgatgacattcgatatcaacgtcattctcgaccagatgccggccatcgtcagcggcgcaggcgtgacgctgatgacctggatcgtcggcaccatcgccgccgccgtcctcggcttcttcgtcgcggtcggccgtcgcttcggcggcatggtgctcgacaaggcgctcggccttgccgtcgcggtgctgcgcggcacgccgttcctgatccagatcttcctcgtctattacggcggccccttcatcgggctttcgctcgatccgatcccggcgggactgatcggcatctccatctacggcgcggcctattacagcgaaatcttccgctccggctttctcgccgtcccgaaaggtcacatcgaggccggcgaatgcgtgggcatgacgcaggggcagatcatccggcgcatccttctgcccgaaatgacgatgctggtgctgccgccctcgctcaacatggcggttctcctgatgaaggagacggcggttctctcgatcatcaccgtgcccgagctgacggcgacgctgagcgccatcggcgcgcagcaatatgccttcgttgaagcgctgtcggtgctggcgctgttttactgggtccttgtcgagatcaccggcaggcttggccatctcgtcgaaacgaaactcacacgattcaggtttttcaacgcatgagccttcccgcgatcgcagtcaaaaatctcgtcaagacattcggcgacaccaccgttcttcacggcatcgacctcgagattccgcaaggccaggtctcgtgcctgatcggcccatccggctccggcaagagcacgctgttgcgctgcatggcctttctcgaggaggcgacatcggggacgatcgccatcaacggcgagacgcttggcttcacggaaaacgcgcaaggcgtgcgagagcgcattccggccggggccaaccgcgcgatccgggcacagatcggcatggtgttccagcagttcaacctgtggccccacatgaccgccctcggcaatgtcagcgaggcgctgaagctggtgcagaaaatgaacaggaaagcggccgaggagctggccatggcgcagctcgtcaaggtcgggctcgaaagccgcgccgggcactatccgtcgcagctatcaggcgggcagcagcagcgcgtggcgattgccagggcgctggcgctgaagccgaagatcatgcttttcgacgaaccgacctcgtcgctcgacccggagctgacgggcgaagttctgaacgtcatgcgcgatctcgcggcggaggggatgacgatggtcgtggtttcccacgagatcggcttcgccgccaccgtcggccagcagatcaccttcctcgaccacggcaaggtgcagttctccggaccacctcaggaggtcttcaggaagccgcgcaatccgcgtctggaacagttcctcgatacctatctggatcgcggcgcctcgatgctgatgtaggcggttcggttgcgcaacatgtcgcgctatcattctgagacgagccgcccgtcggagcgaccgctgaccgcgcctagaccagatacttgttgaaccaggcgaccgtgcgttcccacgcgagcttggcggccgcttcgtcgtaacgcggcgtcgaatcgttgtgaaagccgtgattcacgccgggatagacataggcctcgtacactttcttgtcggccttgagcgccgcctcgtaggccggccagccgtcggtgatgcccttgtccagttcggcataatgcagcagtagcggcgccttgatgcgtgccacgctgtcggcgctcggctgacgtccgtaaaacggcacggcggcgccgagttccggataggcgacggccgcggcattggcgacaccgccgccgtagcagaagccggtgatgccgaccttgcccgtggtgaggtcgctcttcatcagaaactcgatcgcggcgaagaagtcgttcatcagcttttgcggatcgaccttctgctgcagttcgcggcccttttcgtcattgcccggatagccgccgacagacgtcaggccatcgggcgccagcgcgatgaacccggccttggcgacacgccgcgcgacgtcctcgatataaggattaaggccccggttttcatgaacgacgaccacgcccggcaccttccccgtggccttcgccggccgaacgagatagccacgcacatcgccatttcccttgggcgagggataggtgatgtattcggcgatgatgtcgggatcggtgaactccacctgcgtcgcaagcgcatagttcgggctcatggaggagaggattgcggcggcggtcaggcctccgaccgcgaatttgctcgctcggtctaggaattcgcgcttggtgatcctgccgtgcgcgtaatagtcgtagagttcgagcaactcttgggggaagtccttcgcggtcatccggttcatgattgatcctccatccatccgttccggcggcaatattacacgagcgcttcccctcgtcagttcaacattgcgagaccgccgtgccgacaacacggatcatatgagcgccgccgaagccgccaggccgtcatcgtgtcagttgcttcctgtcactcggtccagcgcgccgagaagcgcgcctgcgggaggtagctgaagtcgcgatcgaagggaaaggctggtcgcgcgcggcggttgctgaccagcccctcgatgtcctgattgaccacgccctgcgtcagcgccatcaggttggggttggcgatcggcgccagttccggcgagaggtagccggacttgacgaccagaagccgcaccgccttcggatcaagtccgagcagggcgaagtcggcgatgttgtgatagggccggcggcgcgcggcgagcacgacggtgatcccgccgatgcgcacgaccgcctggcgctcggcggccacacccgtatcggacagcagcaccacctccgcctgcaccttggccggcgtgctcgagccatcgaggctgccgccgatcgtcagggcaagcgtggcgcccttgccggcggcaaagcaggcctcgacggcggggcggtcggtgatccccgcgatcaacgcgccgtcaaagccgcgcgcgatcagcgcgttcagcacgtcggcacgatcgccaacaccgccacccgtcgggttgtcggcggaatcggcaaggatgacaggcgaggtctcggccttctcggcgatatcgagcatctccgccagcggcccggtgacgggaccgaagcggaaatcctcgcgtgcgttccagtaggagagcgcgatctcttccgcggccttggcagcggcacccttgctggtcgccgtgatgaccgcgcaggcggttgcgcgcggctcgtcggcccagacatagccgaccatcagattggcgtcgagaacgcccgctcgttgatcgaagaccggcagcgcctcatagagcgccttcgccggctgatcttccgtcgaagtgcgctcgccgggccagagcaccggcaccggcgcccaggcgacgccagggcgcgtgccgcttttcaaggcatcgaccagcatcgaccaggcgcgcaccatcgtctcgcgtacatcgatatgcggcgcggtccggtaggcggcgaagatatcaagttgatctatgatcttctggctgacattcccatgcaggtcatagctcgccgccacgacgacatcggccccgaccacggcgcgagcagccgagatccaatcgccctctgcgtcgtccatgccctcgacattcatcgcgccatgcatggcgagatagagcccgtcgatcggcaatgcggccttcaagagagtgaggaactcgcttttgaaggcttcgtaggcgacgcgcgagaccgggcctccaggcacggcgcgcgcgtgcagaagcggcagatgttcgacgccttcggccttcagaaagttgaaatactcggcccccagaaggtccgcgcccttgaggacgcgaaaatcctcgatggccatcagcaccggcgaataggtgctgcactccgtatgaattccgccaacagcgatccgcatcgtcagctccttaaagtttcgggctcagcggcacgatggccgagaagcgatcccagttcttcttcgccttcggcgtccaggcggcctcggcaatggcaggcaggcgcgggaagacaagacggttgaaatagccgcgtgacaggaagtgctccgaccagatgcaggcctgcacgcccttcatcctgtccttcagctcttcggggaaatcgccctcggcctcatagccatatgtgtgggccggcggcaccgttcccgcccagctggcaccgggctcctggaaggcctcggcctgcaccatgtcgagataataggcctggccgggggtcatgaccacctcgtagccttccctggcaagctcgatgccgacatcagggttttcccaggccatcagcagcgtgtccttggccgcgacgccgccgccatgggcgacctcgttccagccggcgagcttgcgcccgcgcgcagtcagcatgtccttgacgcgcttcaggaagtaggattgcagcgcgaaggtgccctcgatgccttcctgctccatcagcttcttggcgagcggcgacgccagccaggagccgttcgccacctcgtcgccgccgatatgcaggtacttcgacgggaagagctcgaccatttcgtcgagcaccttttccaggaaggtgtaggtcagcggaatggccgggttcagcgcattgttcggatagccctggaccgaatgatagctgtcgggtgcttcctggccatcggtcagctccggcagcgccacgagggtcgccgtgctgtggccgggaatatcgatctcgggaacgacctcgacgctcaacgtcagcgcgtgcgcgacgatctcgcggacatccccctgcgaatagaagccgccgaccggctccgcgccattgccgagctgcggcaggagcggtgcgtccggcccgcgcagcacgccggtcgtcgtgagctccggataggccttgatctccaggcgccaggcttcgtcgtcggtcaggtgccaatggaagatattgagcttcagccaggccagaatgtcgaccagccgcttgatgtcggccgccggatagaactggcgcgagacatcgagatggcagccacgccagccatagcgtggcttgtcggcgatggtgcccgagatcgggaaacggaacgtgccggggcggctgcgcgcgccctccagcatctgcgccagcgacgtcaggccatactgccgaccggcggcgtccgcataggcgagcgtgatttcatcggccgagaaagtgagcttgtagccttcggccgcaatggcggcatcggtgatgaaacgcagtgcgcgaccctgcggcgacggctggagattgaacggcgcatgcgcgctttcgaacaggcggcggaccagcgaggtgaccgtggacatggcgcgcagatcatccgaggaggcaccggccgcaggatagagcgcgacaggaaagccgtcgcccggcttggcgtcgatctcggccggccagggctgcagcgcgaatggcaggtcgagcttgccctccggcaacagcaccggtggcggctcgctgacgcggccttcgagcaggagatcggacacggcgaccgcgacgtgactgccatcggcgagcgtgacataggccgacttggcgccatcggtgcagtgcttggccgggcggtgcagaccgctcaccgtaaaggtccagccttcacccggcgcgattgacaggcctgttggtggcgcgaattcatggaaattggcgttgcggcgcaggaaggtcgcgttctcgcaagctttcttatcaatcacccgtgtcagcgacgtgtagacgatcttgaagtccgcgagcggcgcatccgacaggttgaaaagggtgaaggtgaagcgaccattcggaccgccgtccggctgccaggagctctccagacgataggggaccgtgtccataactgttcctctcggtattctttttttgatcagtagtcagcggattgggagaaggtgcgggcgagttccgcttgccccgcggtgaggccgcaatcgacgggcaggcagacaccggtaatgccgttcgcctgcgcactcgccaggaagccgaccgcgttggcgacatccttcggatcgacgacacgctgcagcggataccagcggcgcgcttcctcgaagacattggggttggcggcggcgcgggcttcccaggcctgcgtgcgcaccgtgcccggcgcgatcgcgttcgagcggatgccgaacttgccgtattcgacggcgaccagcttggtgaaatgcaaaagaccggccttggcggcgctataggccggatggccgaagacgtgcatgccgttgaccgaggcgatgttgaccaccgagccctgcgtcgccttcaggagatccgcgacggcgctgaagcagaggaacggcgcctcgaggttgagcgcgttatcggcgcgccaatcctccggcttcgtcgactgcaggctgaccgcgcgcgcggcacctgcattgttgaccagtgttttcagcgcgccgagcgacgctgcggccttggccatttcggcaacgctgtgttcgctcgtcacatcgcagctgacggcgacgaagcgctcagccgaacccagcgcacgcgcggccttttcggcggcagcgccgtcgatatcgacaagcaggatgacatcatggtcatccgcgagccggctggcgatggcacggccgatatcgcccgcagcgccggtcacgatcgctaccgattttgtcattctcagtcctttcctgacatgagatcctcagtccccgagcagctgacggtcatcgccgtcacggtgggcaacgagttgttgtttgatgcgtcgaagagtgaccgccgcctgcgggatattataggcgacgaggctggccaggatatcgacggcggccagataggcgatgcgcgtcgaggtcggccggaagatgttgtttccctcggcaagatcgatcggaatgacgatgtcggcggccttggcgacgaggctatcggcctgcgtcagcgcgatggtcgtgaccccggtctcgcgggcgagcgtgaaggagcgtacgagctcggtgttgcgcccggagaatgacgagccgatgatgacatgcgtcgacttcgccgcagccgccagcatcagctgcatgccgtggtcggagctcgcggtgacatgcaggccgaaacgaaagaggcggttctgcagctcgctggcgatcatcgaggaattgccgcccgagccgaaggcatagatcatctccgccttggcgatcttctcggccgcctgctcgatggcggcaaggtcaagcgagcgatgcagcaggaacaacgcgttctgcgccttggtgatgatgtcctgggcgacgtcaccgggatcgcggctcttcggctcgggcctgagatagcgcatgccgacataggccgtgcgggcgagctgaaccttgaaatcggaaaagctctcgcagccgacacggcgacagaagcgggtgacagtgggcggcgagacatccgccttttccgccagctcgatgatcgaggcattgacggcgaattcgaagtcgttgagcagtatctccgcgatacggctttccgacggcgaaagccgggccttctcttcctgcaatgtcgagaaaatgtccacgcccggctccccttggtctatcgcgctatttgtctttcgctttatacgcgacgcaatcgatttcgatcttgcaatcgaccatcatcgacgattgcacacaggcgcgtgccggcgggtgctcgccgaaatactgctgatagataccgttgaaggtccagaaatcacggggatcgtcgagccagacgccgcagcgcacgacatgctcgacgccataaccgacctcttccaggatcgcgatcacgttctggatcgtcttgtgcgtctgcgcgacgatattgccgtcgatgatctcaccattttccatggcaacctgacccgacacataaagccagccgtcggcttcgaccgcacgggcaaacggcagcggctttccgcctgcgccggtctgaacggtgccataacgcttgatggacattgaccgatccttgcaaattattttcgtgataagttgacaagtgaccatattaagcggaatttgaccagagaaaaacgtcattcatgaaaagaatttcaatcgggaacaccatgcgcgatcctttcaagaaccccttccctgcttccgatactgcccggcattcgatctgggagatgctcgttcaccgcgatatcgacgccttcctcgccgccgattggtcgatggtgaagcacgatttcgtcgaggacggcttcatcggtatcgacggccgcaggcaagtgagccccgacaagtggcgcctcgccttcccgacgctcgccgcctatcgcgatgagtgggtccgccaggccaaggatttcgcgacgcaatcctttgccgaggacacccgcaccgctattttcaccacgaccacgctcgaggatatcgagatcgagggcgacatggcgctggtgcgcaagaagttcgacggcggcatcgccaaggccgatggcagccgcgatatcatgcagtggcagaccctttattattgccgcctgcacgaagggcgttggaagatctcgggcttcaccggctatcttccgaacccgatgggttgatcaacacaaaggccgagacattgcggattttcacggcggctctcgcaaccgagaccaataccttctcccccatctgcgtcgatcggcgtgctttcgaggcgtcactctatgcgccgccgggccaacacccggaaacgccgacgctctgcaccgcaccgatcaccgtcggccggcgcgtatgcgcggagaagggctggacgctgatcgaaggcaccgcgacctgggcggatccggccggcctcgtcagccgcgcgacctatgaaggcctgcgcgacgaaattctcgggcagctccgcgccgccatgcccatcgacgccgtggtgcttggcctgcacggcgccatggtcgccgcaggctatgaggacacggaaggcgatacgctgacacgcattcgcgagatcgtcggcgccgacattcccgttttcgccgagcttgatccgcacagccatctgacggcaaagcgtttcgccgcggccaatgttttcgtgtacttcaaggagttcccgcacaccgatttcgtcgatcgcgccgaggacctttggggtatcgccgtcgatacgatcgagggccgcgtcaaacccgtcatgtccgtcttcgattgccggatgatcgacgtgtttccgacctcgcgcgatccgatgcgctctttcgtcgacaagatcatgcgaatcgagaaagacgatcccgatgtactctccatctccgtggttcacggcttcatggcgggtgacgtgccggatatgggcaccaagcttctcgtcgtcaccaacgaccgcaaggacaagggcgatgcgctggcgcatgaactcggcatggagctcttttcaaagcgcggcaccttcatgatgccgcagatcgacgagagagaggctgtgtcgcaggcgctggcggcaaccgcgtggccagtcgtgatcgccgacatgtgggacaaccccggcggcggaacagccggcgacgcgacggtggttctaggcgaactcctggcgcgcggcgtcaccgatgcggcgatcggcaccatctgggacccgatggcggtgcagatctgcatggcggccggggaaggcgcagagattccgcttcgcttcggcgccaagtccgcacccggtaccggcaacccgatcgacggcctcgtcaaggtcatcaagatcgtgccgaacgccgagatgcgcttcggcgagagcttcgcgcccttcggcgatgcggcgcatatcgtgctcgatggcatcgacatcatcctgaactcgacgcgcgcccagagcttcgatccgagcctgttctcagtcatgggcatcgacccgacgcggaagaaaatcctcgtcatcaagtcgacgaaccacttctacgcctccttctcaaagatcgcgtccgaaatcctctattgcgcagcgggcacgccttatcctaacaatccagcgaagacgccgtatcggcgcgcgcgcaaggatatctggcccatgatcgccgatccccacggcgcttaacatggagtagcgtgagatgcacaacagcccatttgccgtcgtcgccaagcccggcgacaaggtcgcggacctttcgacgcctcgccctgtcatcgacgaggatcggatggcggccaatatcgcccgcacgcaggcctatatggacgcgcacggcatcgacttccgcccgcacatcaagacacacaagatcccggcactggccgcccagcaggtcgccgcgggcgccaagggcatcaattgccagaaggtcaccgaggccgaagtcttcgccgaagctggtttcggggacatcctcatcaccttcaacatcatcggcgccgagaagctcgaacgcctcgcggcgctgaacgagcgcatttccggcctgaaggtggtcgcggatagcgcctataccgtcgacggcctttcggcctatttcgcggcgcgcaagccgcttgtggtgctggtcgagtgcgataccggcgccggacgctgcggcgtgcagaaacccgctcaagcagcagcgcttgccaagcgcatcgacgcggcggcgggcctggcatttggcgggctcctgaactatccgaaaccgggcgccgctaccgaggtacaggcgtttctttcgcaagcgctcgcgttgatcgaggccgagggcgtcacctgccccatcgtcagcaacggcggatcgccgagcctcttcgacgcgcatctggtcccggccgcgacggaacaccgtgccggcacctatatctataatgaccgctccatggtccgcgccggccattgcacggaagacgactgcgccatgcatatcctcgcgacggtcgtttcgcgcccgacgggggatcgcgccgtgatcgatgcggggtcgaaggcgctgacatccgatctgctcggcttcacggattatggtcaggtggtcggctatccgcaggcttcgatcaccggcctgtctgaagagcacggcgtgatcgacctgtcgaaatgcgagggcgcgcggcctgcgatcggcgacaagatcctgatcatcccgaaccatacctgtgtcgtctccaaccttttcgacaccatggttttccaccgcgacggcgtcgtcacgcgcgtcgaggacgtcgcggcgcgcgggctggtctggtagccagaaccacgcgtcggcggccgttcgccggccgccgacgccatcgtacgagacctccttgaagtttgccttgtccggcgcatcttatggatgcgccaatattccggcgatgtcctgggaggtcattcatgagaattctgatcgcattgggaatagcagcaagcttcgcgtgcgtttcggccgcgcaggcgccggcgcagtggcagacctattccggcgtccgcgtcgattccgacccgaccattctcgcccgcttcgaccgcacatatccttattgcgagcaggaagcgtttcgccgcggctcgaccgacgtcaacagcctgtggcacgtgacggcgttgcgcaactgcatgtatcgccacggcatcgttgaccggggctcatactcctacccggccaacgccttgttctacaatttcatcgatcgctgatgacgcgaccggcgctcgcgatcaggcaagcgccgtcgggttcaacagattgagatcgatatcggtcaacgccacgtggcgttcgaacgcgatgccggcgccgtcgaagaggtggcagtccgcagcgttgatgccgaccagcatgggctgctccgggcgcacgccgacgctgccggatagcgtggcgcagaagttctcaccctcgccatccagcgcggcataggcaacggtctgcgcgccgagacgctcgatgacgctcggggtgatcgtgagcgagatatcgcccgatgcgagctggatatgttcaggacggacgccgagtgtcagcgccttgcccacgacaccctcgcgcggcgtgaccggcaccgtcagcgtctggcccttgtaatcgaccgtcacgctcttgtcggctgcaccggtgcaggtgactggcaggaaattcatcttcggattgccgatgaagccggccacgaacatattggcgggcttgtgatagagttcgagcggcgcgcccgtctgggcgatctcgccggcgttgagcacgacgatgcggtcggccatcgtcatcgcctcgacctgatcgtgggtgacgtagatcatcgtcgccttgagctggcggtgcagtttcgcgagttcgatgcgcatgtcggagcgcagcgcggcgtcgaggttggacaaaggttcgtcgaacaggaagatcttcggctcgcgcacgatcgcgcggccgatcgccacgcgctggcgctggccacccgagagcatgcccggcttctgctgcagacgctggtcgagatgcaggatgcgggcggcgttttccaccttggccttcagcttcccctcttccatcttctcgacgcgcagcggaaaggcgatgttttcgaaaacgctcatatgcggataaagcgcgtaggactggaacaccatggcgatgccgcgcttgacgggtggcagatcgttcaccctgacgccgtcgatcacgatgtcacccgccgaggttccgtccaagcctgcgatcatgcgaagcaaggtggatttgccgcaaccggatgggccgacgaacacgacgaactcgccattgttcacctcgagctgaacgcccttcagaacctcgaagtcgccgtaaaatttctgaaccttgttgagaagtagctgtcccaaaacctgtctccgctcaccgccacgcgcggcgcatactctcgatagcgaagggatcgcgggtgttgcgccccgcgatccccaacaaaggcttacttgaacgcctcgatatcggtggcggccttcttgagggcgtcggccggctcggccttgcccgtcacgacggactggaccatctcgatcatggaattctggaagcccttgtagtccttgaacaacggctccgggccaccataggcgatgccgtcgatgaacggcttccagaagggctccttcttgacgaattcatcgacctgggccgacggacgcagcggcgtcaggccggcgccaccctggagttcatactcgccctgcggacccggagaggtgatgaacttggcgaactcggttgccttttcctcgacgcccgaacccttgaagatcgccaggctgtcggtaatgagcagcgtgccctggcccttggcggagggaccgagcggcagcggcgcgacgccccattcgagcttcgtgtccttgaggcgataggcggcgcccgaaccggcctggatcatgccgaccttgccgtcgaggaagatggcgcggatttcgttctgttcgtaggcggtggcaccttcgactgagtaaggcgtgatgtccttgtaggcctggagagcggcaagaacctcagggctgtcggccttgatgttgcccttgtcgtcgatgatcgtgccgttgttggtgtaaacccaatgcatgaactggtgcatcgtgttgtcgaaggtcttggctggcagaccatagcccggaatgcccgtcttttccttgatcgccttggcaaaggcgatttcctcggcccaggtctgcggcggcttttccggatcgagaccagcctgcttgaacagggccttgttccagtagagcgccttggtcgagaaggcgatcggaacgccccactgcgtgtcgtcgaacgtcaccgtgctgacgatgcccggatagtagctcttcttctcgtcatcgctcatcggaaccgggacgatcaggtcgttttccgcgaattccttcagcgtgcgcgagccgacataggccatggccacgggcgttcccgccgcggcaagcgtcgttgccttgtcctggcactgttcccagcccacgacctcaggcttcaccgaccagccggcgttcttgccttcccattccttgatgtatttttcatggatcgggtcgatcttgtcgccgcaataaatccacgaaatttcctgattggcggcctgggccacaacggtgccaagcgccgtggaaccaagcagggccaacgctgcgagcccagttctaaaagtcatgttcacgaaagtcactcccgttctctggtggttgtttattgtttcaccgcgccagcggtaagcccgctgacgagatagcgttgcaggaagaagatcacgaccagagccggcgcgatgccgacgaaacttgcggccatgagctcattccatacgacctcctgccggccgaaataggcgaacagcccgaccggcagcggcatgtattccgtttttgagttgaacgtcagcgcatagatgaactgctgcgcgtaggcttcgatgaacgaagagatggcaacaacgacaatgccgggcatggcgatcggcagaatgacccgccgcagcgtatagaactggctggctccatcgacatatgccgcctcgtcgagttcgcgcggaatacgacgcatgtaggtgtagagtagccagattccggttgggatgatgaacgcgacacccggcacgatcatcgcgaaataggtgttcagcaccccaaacgagcgcatcaacctgaacagggggatcagcaacacggcaccggagaacatcttgaccgcaagaaagccgccgagaagcagacccgcgcccctgaactcgtagcgggcgaaagcgtaggcggcaggcacgacgaagatcagcacgacgatggtgatgatccccgaaatcaggaacgagttgaagatataccaggcgaaaccgggcacgctcacccacatcgtcctataggcctcgaacgatccgttttcgggaatgaaccgataaggcgacgaaaacagctgtgacagcggcttcagcgacaccaggaacccctcgatgaaaggtgcaagcacgaaggtgaggaagatcaggattccgagatagatcccgacgatttcgtaccagcggtaacggttgatcatcgacgtcgactggctcatcgcttttctcccccggtaaagcggctggtaatcctgaagtagcagaggcagaagatcgacaggaagatgcagatcagaacggcgcgggccgccccttccccgtatttgttcgaaccgatcgcggtcttgtaggtgtcgatgatcatcgtcgtcgtttcaccattcggtccgccgcgcgtcagaatccagatgatgtcgaaggaattgaacgtcgagatcagggacagcatcgacatcgttaccatcgacggaacgagaagcggcagcgtgatgcggcggaagcggtaccaacggccggccccatccgtccatgcggcttcgtagagatcctgcggcaccgattgcatggcggcaagcatatagagcgtgaccatcggcacgccgatccacacgtcggtgatgatcgtcgcccagaaagccgtgttgccgtatgcaagaaaggcgaccggaccatcgacgaagcccatgcgctgcagcatgcctgagatcatgccgaactggccgttatacatccagccccacatgaaaatgccgatagccatcggtacgatccacggcggcatggtcaaaattcgaaacagagcccgtcccggaactgctgcattgagcatagccgcgccgaatgtgccaatgatcatcttgatcgagacggaaaagaacgtccagatgaaggtccggaggatgacctgaaagaaggtgtcgttgaaaatcttgctgtaattcgcccagccgacccagttcgtcgtcctcttcagcgacgcgtcggtgaaggacagaatgaaggtgtcgaccagcggataggcaacgatgacggtgacatagagcagagccggcagaagcaggatccaggcgaagatgagtgtgctacgttgaacgctcattccgccgtctccttatgccgcccgtgcgtgaagcgcctcgtcgaaccggtcccatacgggacgcagatccacgaccgatcgcttcatgcgggcctcgtccatcgaaagcgcaagaatacccgcctccagcgcattaagcgtcgacacaggcagcaccgtgccggtgcgaacgctgtcgagaatatcgacggccatctgttcgtcggcaccatagtgctgcgacagctcggtggcggcgtaggtgttttcgacgaccttcttgccggtcagttgctcatgcacgtccagatagccgcgaacgaaatcgccttcggccatgccgcgcgatcccatgatcgcaaagcggcggaactggtcgggtacgttgagattggtgtggaagttcatgccgacgccgttggcgtattcgacgatcgcgacctgatagtcgatgatgtcggcgtcactgtcgaacaccttgtcggtgcccttccagccgctcggcttgcgatggaacagttcgagatcgttgatgccttcgcgggccggatcgttgtcaggcgtgaagctcttgcgtccgccgaagcttgcgacccgttcgggccgcgcgccgacgatgccattatacaggtcgagatcgtggcagcacttctccagcatgaagctgccggaatagcgctcgtagcggcgccagtcgcgcatgaagaaagcgccgtgatagggctcgatgtgctcggatgcctcgatcgaaacgatctggccgagattgcccgccgcctgaaccgcctgcaggtcgcggtaaagcggcgagtagcgcagcaccagcccgaccataagccgctcatggccgaacttggccatcagacgcgcgagctcgacgctttcggcaatcgtcgtcacgatcggcttttcgcaaaacaccttgagaccggcttcgagaccgatacggatatgttcgagatggaagagattgggcgagccgatcatcaagagatcgagcttctcgttggcgatcagctcctgcggagaggcataggatttaccaacggaaatgccgttttcgacgagacccggcaggcccgcgggctcgggatcgacatagccgacgatctcgaagctttcatcaatggacttgaagacatagccaagatagccgagccggaatcctagcccgataattcccactttcatgctgttctcgttcccatttacgtaatttattttcgtcaggttgagacaaaaattcgatctcgtcaacaagaaacacggaaaaagttggaactgtgaaattgattttcataatggttgttcgaagactgttttgattttcaccatcggcgtggcgaccaccatccacccggcctcggccaagagcatgctcgccgcccatctttacggggcgggcgtcgcgacatgccgtccgcattccaggcgcgctcgatttgagcattgacagaattggtgccgtctctcacaagttcgaggaaacataccaacatcgattgcgaggcgtgtcaaatgaacgatcccaccgcgaatatcgatgcattcgacatgaagatcctcagcgccatgcagcacgacgcgaccttgtcgcaacgcgatctggcggagaagatcggcctctcgcagaacgcctgctggcgacgactgcaacggctgcattcgctcgggctgatccgcggatcgcacagcgacatcgacctcaaggctctgggcttcgacctgacggtcttcgtcatgatccgcacccgccatcattcgaaggactggagcgagggttttcgggcgcatgtcgagcggctgcccgaggtgatcgacttctatcgcatcggcggcgattgggattatctgatcaaggtcgtcacgaaaggcatgtccggctacgacgcgttctaccagaagctcatcaccaatttcgatctcgccaccgtcaccggcttcttttcgatggaggcgatcatcaacaatcgcccggtggatttgacccgattgcgctagcgacccggcccggtgacgcgtggatgtcggcgaccgacaacgtacgcagcgccttacactttccagtctctcgacgccgcttctacagccgaacagcagcatctaactttgacgacgctaaagtgtcgcggccaaatgtagccatcgctactgtaaagcaggggaaacaccgagccggcggttgagaaattccttgaaacgcgtcacaaaactgccgcacttacaaaccgcgcgctgcgaaagcgtgctgacccgaggtccattgcaatgaaaatcggcgttccgaaagaaataaccgtcggcgaggcgcgtgtggcgatgacgccggactccgcgctgcaattgcagaaactcggctatgactgcgtcatcgaaaccggcgcgggtctcgccgccggcttttccgacgagacctaccgtgctgccggcgtcgaaatcgcgccctcggccgacagtctctgggcatcggccgacgtcatcgccaaggtgcgtccgccggagagcacagagaccgaaaggcttgggcccgagaaaacgctgatctccttcttttatccggctcagaacgcggcacttctggagcaggcgaaggcgaccggcgccaacatcgtggccatggacatggtgccgcgcatttcgcgtgcccagaagatggacgccctgtcgtcgatggccaacatcgccggctatcgcgccgtcatcgaagccggcaataatttcggccgcttcttcaccggccaggtgacggccgccggcaaggttccgccggccaaggtgctggtcatcggcgccggggtcgccggtcttgccgcgatcggcaccgccacctcgctcggcgccatcacctatgccttcgacgttcgccccgaggtggccgaacagatcgaaagcatgggcgcggagttcgtcttcctcgatttcaacgagagccagcaggacggcgccgccaccggcggctacgcggccccctcatcgccggagttccgtgagaagcaactggccaagttccgcgaactcgcgccgcagatcgatatcgtcatcaccacggcgctgatcccgggccgcgatgcgccgaagctgtggctggccgacatggtcaccgccatgaaacccggttccgtcatcatcgatctcgcggccgagcgcggcggcaattgcgatctcaccgtcgccgaccagaagatcgtctccgacaacggcgtcaccgtcgtcggctacaccgatttcccaagccgcatggccgcgcagtcgtcgacgctctattcgaccaatatccgccacatgatgacggacctgacgccggccaaggatggcaagctcgtccataacatggaagacgacgtcatccgcggcgcaaccgtcgccttcaagggcgcgatcacctatccgccgccgccgccgaagatccaggccatcgccgcccagaagcggcccgacaagccaaaggagccgacccccgaggaaaagcgcgcgcgcgaggcagccgccttcaaggcgcagaccaagagccagggcttcctgctcctgatcggcacggcacttctgctcctggtcggcgcctatgccccggcaagcttcatgaaccatttcgtggtgttcatgctcgcgtgcttcatcggcttccaggtgatctggaacgtctcacactcgctgcatacgccgctgatggcggtgacaaacgcgatttcgggcatcgtcattctcggtgcgctgctgcaggtcgggtccggcaactggctggtcgtcacccttgccgcgctatcggttctcgtcgcgacgatcaacatcgtgggcggttttcttgtcacgcggcgcatgctcgccatgttccagaagtcctgatcgggccagggatatcaagggattttcattatgacgattggtatcgtttcggccgcctatatttccgcggctgtgcttttcatcctctcgctgggcggcctctccggtcaggaaagcgccaagcgcgccgcctggtacggcatcgtcggaatggcgctcgccattgtcgcgaccatcttcggcccgggcgtcggcaactggctcatcattctgccaatgatcctggcgggttccatcgccggctacttcgtcgcgagccgtgtgcagatgacggagatgccgcaactggtggcagcgctccactccttcgtgggccttgccgccgtgttcatcggcttcaacgcccatatcgagtcatggcggatcgccggcatggatgaaaccgcgcgcgcggccctcgacggctttgccggcattctcgcccgcaagacgccggtcgagctcgccatcatgaaggtcgaggttttcttgggcgtcttcatcggcgccgtcaccttcacgggctctgtcgtcgctttcggcaagctcgccggcaagatcgacggtaaggcgacgaaattgcccggtggccatttcctaaatgcgagcgccgcgatcctgtcgctgatcctgctgctcatgtatgcgaacggggccggtgtgtggaccctgatcctgatgacgctgctggcgttcttcatcggttaccacctgatcatgggcatcggcggcgccgatatgcctgtcgtcgtctcgatgctgaacagctattccggttgggcggcggccgccatcggcttcaccctgggcaacgatctcctgatcgtcaccggcgcgttggtcggctcctcgggcgcgatcctctcctatatcatgtgcaaggcgatgaaccgctccttcgtctcggtcatactcggcggtttcggcacgacgaccagaccggcgatggaaatagaaggcgaacagatcgccatcgatgccgagggcgtggcctcagcgctcaacgatgccgacagcatcgtcatcgtgccgggctacggcatggccgtcgcgcaggcgcaacaggcggtttccgagctcacgcgcaagctgcgcgccgccggcaagaccgtccgcttcgccatccatccggtcgccggccgcctgccggggcatatgaacgtgctgctcgcagaagcgaaggttccttacgacatcgtgcttgaaatggacgagatcaacgacgacttccccgagaccgacgtcgtgatcgtcatcggttcgaacgacatcgtcaatccggcggcgcaggaagacccgaactcaccgatcgctggcatgccggttctggaagtgtggaaggccaagcaggtcttcgtgtcgaaacgcggtcagggcacgggttattccggcatcgagaacccgctgttctacaaggagaacacgcgcatgttctatggcgacgccaagaagagcatcgaccggctgctacccgcgatcgggtgaagcccgatcagggagccgaacactcgatggtcggctttcagttgtgagaggtgcgtcggagatgcacagacggcaaaggctgtgaccacggcgagcggatagtgctcgcgcatcgccttgcacagcttctcggtcattgcggtcttgcccgaacccacgggaccaccgataccgatgcgcggaggaccgttcttcgacaccatctgatctcaacctcccaaaccgatggcgcgaatgggcgaacacaagccgaagggataacacgttctttatgcgtaaatcgtccaggagatgggcatcccgtccctaatctcacgccaggccaagaccgttcgttgacaaggcggcaacccggcaaatatctcgcgaagctctgtccatggagaggcaagatgcgtcgaaacatatggattgccttcgtttcctgcctgctgctgaccacgtcgccgtcagcccccgcctatgccgtgaccgtcaacatcaacgtcggttccgatctcaatttcggccgcgcgatcagttgcagacaggggcagcaactgcttgagaaccgcggcttccgcaatgtccggcgtatcgactgtcggggtcggacgttcatctatcatggccgacgcggcagcagcgatttcgagattgccctcagcgcgcaaacgggccgcgtgatccgcatgaccaggcttcgccgatagtctaggcagccaatcatcccgagcctgctccgagtttggcttccggctcgctcggcgcaccgaggatttccgctatccagcgcgtcgaggaaaagcgcgcgcagaaggtgaggatcgcgatcgtgatcggcacgccgatgaaggcaccgaacacgccccagacaaacgaccaggaaaagaccgaaaacagcaccaggaatggcgacatcgcaagcgcatagcccgcaacgcgcggttcgatgtagctcccgatgacgaattgtatgatgttgagcccggcgaagatcaggatcgcggcctccggcgatccgaattgcgccaacgcataggcgcttggaagcaatgtcgccacgaaggggcccatgaacggaatgtagttcagcgtgaaggcgatgacgccccattcggccgcgaagcgcagcccgaagagcgcggaaagcacccagacgagcgtgccggtaacaaggctcatgaccgtgcgcaccgccatgtagcgccgcagcttggcggccgtctgcaacgcaccgccaacgatcgcatccgccttatcgtcgctgagggcttttcggatgttgcgcgcgacggcctcggtgtcgagcagcccaaggagcacatagacgacaacaacgatccagaaggaaatcatcgtgttcaagcgggccgtcgctccctgcaggacgcgaagcagcgcgccgaaattgaaatagtccgcccagacgccggcgatgacgatgccgtgcccgtcgagccattgcacgagattgccatagagcaactggaactgcgccgcttcactcacgacggagcgaccgatccgcccgaagccccaagcggatatcgaggcgagaacgataaagacgcagacgatcaccgccaccaccagcgcaagggcgaccagcttgggcagaacgcgctgcaggctgctctgaagcggccaaacgagaccgatgatgaaaagcgcgcctgcgacgggcgcgaagacgccagccgccgtccgcaacacccacaagaccgcaaccgcggcgatgatggtcaagagagcgatcacggctcggctgttcatcccgtcgacctctcctccaatttccgtgaaccgtgccccatcctcacaaatatcgttgggccgacaatgggttggccgtcccaaaagcatgcctgacgtctctattcactgggacgacgaattgcccgcgcgccggtgagccgcgttgccgatacctagttgaagggccatatccgcggcacgaggaagacggcgacgatgaagaaccatgccatcaggggcgtgccgagcttccagtagtcgccgaagcgatatccgcctgcccccatgaccatcatgttggtcgttgtcgcgatcggcgtcatgaaggatgccgatccggcgacgcaaaggctcatgagcagcggctgtggctggatgttcatggccgccgccgccgccatcgcgatcggaatgaccagcatcgtcgtcgccgtgttgctcatgacctgccccagcacggctgtgagcatgaaaagacccgcgacgagagcgccaggcccggccgagccgagcgcggagacaagttcgtcggccacgaatttcgccgtacccgattgtatcatcgccgtcgaaatcggcatcatcgcgccgatcaggataaccgtcgtccaatgcacggcccgataggcctgctcgaccgtgatcgcgccggaggcaacgagcaggcaggcgcacaagatgccggcgacggcgggcggcacgatgttcgacgccagcatgatgacaagcgcaatcaacgtcgccacggcgaccttggcgcccggccccatcggcacggcatggcgacggacgagatcgggggaatcgacgacgaggacatcgggatcgtcgaggcgcagatcgagcgcctcccagctgccttcgagaaggatcgtatcacctgccttgagccgcggatcggcatagtcgatttccgctccgccgcgatgcacggccaggacaacgagatcaccgctctcggtggcaaggccgggaaacatcgactgccctatcagcttggatcgcggaggcaccatcacctcggccaggccggacctgcgattgaacgcggcattgccacttccctcgggcgcgtcctcgcgaacggccaggtgaagccgcccggccacctccgcgaccgcctgggcggtaccgcgcacaagcagataatcatcggctttcatggccctgtcgcgaaccggcagaccggacgccgacgcctggacggccatgacctgcacgtcgctggcagcatcaagatcgatggtatcggtcgacaagccaaccagcggcgaatgccgccggattcgaagccggaagaggccatcctccaggccgtaatgctcgaccagcgtctgggcatggccgctgaaatcggcgggcagaagtgcgtgcgtctgacggggcagcagatacttgcccagcaacaggacgatgaggacagtgccggtgagaagcggcacgccgacaagggcgaattcggtaaagccgaaccctttaaatccggcatcctcaagcgcttcggacacgaggaaattcttcggggcgcccgtcagcaacaggttcgcgcccgcatgagcggagaaggccagaggcatcagcaattgcgcgggcgactgatttagccgcaccgccgcgaacaccgcgacgggtatcaatgccgccacggccccgctgccgctgagaagcgacgtcaggccaccgacggcgatcatgagaacgagcagaagccggctgcggttgttgtggccggcgagcgagatgagcgcttgcccgcaccacgccgtgacgccggttctttcgagcgcggcactcacgacgaagaggctggcgacgaacaggacggcgcggtcgccgaagccggccaacgcttgctccagagtgacgagctccgcggcccagagcgaaagcgccgccgcgaaggcgacggcgatgacgggcagcctgttccacgcgaagagaatgatcgtcgcaaggattatgaaaccggtgctctggatcgcggtcaaatagggcctcccccgcctaaggcgtggtatcgacgaagcctttcctgcatggcggcgtcacgacgtcgccgctggcgctgtctccacttccgcctgggcggcggacagtgcctctcgcaacgcggcctccctggtctcgtcgaaggacgtctgcaggagctcgccgccgacgcccctgagatcggccagcaccttgtcggtcgtcatcttgcgcaccagcaggaacagcccggcggtacccggctgcagaacagacgcggccttcttcatgaattgatcgttgatcccgccgtcgctgagttcgccggcaagcgcaccggacgccgcgcccagcgcggtccccaccagaggcatcagaaagatcgccccgatcagcgttccccatagggcgccggaagcagcaccccgcgtggtgagattgacgagctgattgagtttgatatgcgccttttcgttcttcacgacgacaacggcgtcttcaagttcgatgaggtattcctgttgcagcgacagcaccttctgcctgatctcctcggccttggcctcggtcgggaacccgatgaaaatcagatcgctcatctccgcctccttttgctgaaaagtcgacctttggggataccgtgcagctgccgcgaaataggggttgaagagcaatcggagcggccgagcgaacacggttatcgcgactacgctagcaattgcggcgacaataatgatgcgcggcaaatcccaatattgcgctcgtcgtcccattttcgtctggacagaaaacgcgtccagcgacatcggtctacgggctggtcgccatgtcgaagagcaggatgggagcggcaacggcaaaggtcgcggctgcgccgatcgcatcgaccgccgtcgtgggcctcgcaaggtcggcgtcggagatctgctgcccctgcaccagtcgatcgccgatcaggcgaacggcttcggggctcgtggcgaacagcgcgtgattgacccgatctcccgaactcagcgcgctcagatccagcaccgtgacaccctgcaaatccgagagtgctcgccggtagtcgtcctgcgaggggtcaatgccgcctagacgggcatctccgcgtgcaatgaaccgcgacaggcgaagcgccaggtcattgcgcgcggagaatatcgttatcttggggcgtttcggccccatatcctcgacctgcctgcgaaagaccccgacatccaggtccggagacgcaagaatgaggctcgagaccttgctcggcacgccgccgcgtcgcaaggcgacctgcctgatcgcctcgaccgccagccaggcgcccatggagtgggcaagcacgaccacctcgttgatcgactggctgtcgatcgcggcctgaagcaggttcgccagatccgatcgggagtaggaggcgttatcgaggtcgcgcttataatcgagaaaacgcccgcgcgacggccatgaaaacaggatcggaacggcatccgcatctgaatcgtgcacgagctgcgcgaaacggaaaacagcgcggtcgaaagtcgtactgtagccatggacgaaaacgaaggcgcgtcgcttctgtggcccttgcgcacgaaacgcggcgccgatatcggcgcgattgatgggggttaccgatgtcgccgcgaaggtccgttcgggatcggcgggcgagcggcggggaagctcgagcgtccccgcctcgcgattgcggggcacggaaatgccaatccgggtgtaggacacggatgtacctcgctccccgccatatagcaccgccggatcatcgaccggagcccgggtcgtcgccgcgatgagcgtgatctgatcggcgtttttcgtcggaggggtaatgttcaaaagccctggctgcgggccggcgcagcccgcaaggccagcaagaaaaacggataccatgacgagccgccgccagcgcatctctacctcggcaggtcacggcggcaacgccagacccttccgtcgaaaagcatggttaccataggaaagacacactccacgacccctcgcgcttacctgccgccagacctcggacagggtcaatagccgcagtcgcgaaatcgcctggccccgaatagttcgggacgcatggcgtagcttcgggacgcccggctcatgacatatcgcatcggccggcccatcgtgaaggtcgatctcacatgcaccgacggccatcagcgcgtttgaaatcgtctcaggattgggtcttctcaaagggatagtggaattgaatccggtagccctcgttgcgatcatcgtcgctgcagcgatcgttctattcatgtggaacaggctgccggtcgcggttgtcgcaatgctggtctgcctgtccttgtgggcatcgggaatactcagtctcgagcaggcgctcgccggctttggcgatcccgtcgtgatcttcatcgcgacgctgttcgttgtcagctcggcgctcgaaatcaccggggtaaccgcctggatcggaaagcacctcatccgggcggcgggcgaaaaaagccgcgcacgcttcgtcgttctgatgatgggcctcacagcgatgctgacgatgttcgtcggaacgacaggcgctgtcgtggcgcttttgcctgtggttatcgtgatttcggtccggcttggccgaaagtcctcgcaactcctcatgcccctcgccttcgcggcgcatgcgggctcgatgctggcgctgaccgggacgccggtgaacgtgcttgtttcggacgctgcggtcgacgcggggtttgcaggcttcggcttcttcgaattcgcccttgtcgggctcccgctgctcctcggcagcatggcgatcgtcgtcctcctcggcgcgcggcttctgccgcaacgcaacggcgccgtcatccccgcggatttcagccggcatgcccgaacgctggtcgaacaatatgggcttggcaatgatattcaccgcctgcgcattcgcggctcttcgcattacgtcggcagagcgccgtcgacgatcgacctggcacccgacgaaggaatgcagctggtggcggtgcatgagggtgacacggccagaccgatcagccggccgcatatcgccgaaggcgatcatcttctgttgcgcggcgatgccgatgtcgtcgcgaaattcgcggcggacacgcacctgtccttccgcgaccatacgggaggcgctgacgatatcctcttcacccacaaatcgggactggcggaggtggcgattccgccccgctcaggcctgatcgggcagcgcgtctttccagggatggtgacggagagcggcgatctgatcgtcctcgcggttcagaaggccggagcaccgatcgatgaaatcgagccgcagagccaggcgggcgcagtcgtgctcggcgccggcgatacgatgctgttgcagggaacctggaaggcgctggacacgcgcctcagcgacccggatgtactgaccgtcggctcgccggatctcgttcgcagacaagccgcgccaatgggcggcgaagcaagacgggccgccttcatctcggccgcgatgatccttcttcttgcgaccggcctcgtgcctccggcggtggcgggtctgcttgccgcgggagcgatccttctctcgcgaatcctgaccccggagcagtcctaccatgcgatcggctggacgaccgtggtgctcgtcgcggcgatgaagccgctcggcaccgcgatgacggagaccggcgccgcgcaactggccgccgatcaactcctttccgtcgtcggccagagcagcccgaccatgcttctggcgggtctttttctgctgaccgccttgcttggacagttcatcagcaatatggcgaccgccttgatcgcgatcccgatcggggttgccgctgcagccggcatgggcatttctccgcgccctgtcctgatgagcacggccgtcgcggcggcggcggccttcctgacgccgatcgcggcgccggcaaacgcgttggtcatgggaccgggcgggtacactttcggtgattactggaaactgggcttgccgctccttgcctggttcttcgtcgttgccgtcttcatcgtcccgctcatctggccgttctaggtatcgagcacgatgccgtcatgttgtcgatgcctcagcggcgcatcgcaaatcacgttgcggccgggcagcgtcggcccaatgaaatgaagtcagggaggataacccatgctgcggatcggagagaagtatcgccaccttattcacggcgcggggtgcggctgctcgcatccggatctgcagagggcctcgcgcaggatggatgccttctcgcgacgtgacctactatcggggctggcggcgaccgcccttgttggcgcgctgtccgcgccgagtctcgcacagacggcttccaagccgaccgagaccctgctgagcaacgcccggcttttcgacagcaaggccggcgcggtgatcgataatgttcaggttctgatcagcggcaaccagatcgccgatgtcgatcggtcccgctcgccgccgccggagggtgcgactgttctagactgccgcaacggcgtcatcatgcctgggctgatcgacgcgcactggcacacgatcttcgctggggttccgctgaaccagctgctgggcgcggatccgggcatcgtcttcgccgcatcgaccgccgaagccgagcgcacgctgatgcgcggcttcacgacggtgcgcgatcttggcggccccgtcttctcgttcaagcaagcgatcgacggcggccttatccccggaccgcgcatctacccgtccggcgcgatgatcaccacgtcaggcgggcatggcgacttgcgtctacccaacgagatcccgagggatggaaacaggctgagcagcagcgagctcttcggtggcgccgcgatcgtcgatggcatggatgacttgaaacttcgggtacgcgagcagctgctgcagggcgcatcacaggtcaagatcgtcggcagcggcggtgtttcgtcgccacgcagcccgctggatatgaccaccttcagcgaggaggacctgcgagccgcggccggcgtcgcctcggactggaatacctacgtcacagtccatgcctacacgccgcgcgccgttcaacgcgcgctacgggcaggcataacctgcatcgagcacgcccatctgatcgatgaagagacggcggccatgatcgcggaaaagggcgcgtggctgagcacgcaacccttcctgacgatggcggacgcggcgtctcaaagcggacctggcgtcgagcgtgccaagcagatcttcctgggaaccccgatgctctaccaatacgcgcgcaaatacggcatcaagaccgcctggggatcggacgtgcttttttctccggagctcggaccgcggcagaacatcatgctgacccatctcggtaactggtaccggaacgccgaagtgttgcagatggcgacatcaggcaacgcgcagctgctcgaactatccaacatgcgaaacccttaccccggcaagctcggcgttgtcgagcaaggcgctctggccgatctgttggtcgtcgacggcaatccggcggaagatctcgcgctcgtggagaacccgcaaaagaatttcctggcgatcatgaaggacggacgcctacacaagaacatcctttgaaatcggcggctcatgcccagaccggatggtgaggctgcccatccccaccaacacgttagccgggaaatgttgtgtgtttgcatctttattttacatatcgaaaattgtatgaatggccttcgtttgaggtttaccttctgcacacagtcaacattgtcgccctgatgcaaatcggtttcattcgtcttgcaccggcgcgtgcttcgatactggtcacttcatgtttgcttagtcttgtgttcaaggggcgatatcatgaatgcacgggtggagttgggttcgacatcgaccgcggctttcgcggacgagccactgagatgcgcaatcgaatgtgataccgcctgcgctcgcgcgccagagcgcttcgaatgcttccggaactggcactcttccgtcatcgatgtgggtttgaagagcggcgagacaattacctttgaagcaaccgagaatatctggcaactcggcgatatcgtgcttgccgttatcaatgcgtctcccgatcatctgctgcgctgggagcacaagaaaaagccggccgtcgacaattgggtcgtatcggtcaaggacacttgcgcatcctgcaccgccgatagcgcctcccggcggaggcttcacttgaccaacctcacggcgccgcacgtctgcgacagcgaggggcggctgatcgcgctttttctcccctaccacacgatcgatgcgcccctccaacccgagatctcggaggaggccgcagaattcctcgccgattacctcaccctgttgcatcacaatctctcccatttgcgccgaagcaacgtcaccaaggtcgccgaagccaccatccatatgctcgcagccctgctcctgccgtcccacgaaaagctggcgcaagcacaagcgccgatcgatgccgtgatagcgacccgcaccattcgcgccatcgatgccaagcttgcggaccccgccttgacgccggactatctttgcaaaagtgtcggcgtttcgcgttcgcgtctctatagaattttcgaacctgctggcggaatctccagttatatccgccggagacgactgcttgaaaccagacgtgcgcttgccgacagttccaatattcactcgatcgcgcagatcgcggagaacatggggtttaccgacccatcgacttacagccgtatgttcaagcgcgagttcgggttgtcaccgaaggcagtgcgcgcgctgggctggcagggaatgctgcaatcaggctcgcctgacatgaatcccggggacagcggcaaccgtacattgaacaccctcctggtcagcaattcgctgggcatgtcgatcgacagttgagaatgccggcacgttttcgcttctacgcccgacgcgaagaaacggacactacgcacagcattgggatggaatgcgtatattcaaatcagaacatatgaatagagttgcgtaatatcgacaagcaattacgacgcctaagaccccgcctctgcttaattttctaagttcgacgaaggcacatcggtcatctgccacacgaagcttgtgaacgcgggtgatatcctttcctcaagccaaccaacttcctgtcagtgacaagtgctcaacggtaggatgcattcatgcagcacgacagcaacattgccgccaggaacgatggccaggttcctctcaaatgcgtcgtcaacatcgatacatcggtcgcaccgcctgccgaacagttcgatctctatcgatcctggaattcaagtcttggagatgtcacgctgctgcgtggcaagttcagttccttcatggcgcgtcaacaggtctggcagctagggagccttgcgctgatgtcgctggattatcgcggcaccggctatcgccggcgctggaacagcaagaaggatcccgttttcgatcactggatcctgagtatcccgctcaccgtccctgagaatgggggtcctagtcttcccggcaagctgcactggcattgccttgccgcgccctatgaggcggaaggagaggatgacggcgcgctcgcacttctcctcccccgtgacttcgcgttctcgcagcccctcgacctttctattcgtcccgagatggcggcgctgatcgtggattacatccagcttcttcatcgctcgcttcccaaccggacggagcgggatgccgaacatatcgccgtcgcgacgaccacattgcttgccgcctgcctcgcgccatcacgcgatcaccttgtcgaagcggatggaccgatcaacggcgtgatcatggcacgcgcgaagacgctcattgcctcgcagctcgccaagcgcgacctgtcaccggaaaagctgtgtcgcgacctgaacatctcgcgatcccgcctctatcggattttcgaacccagcggcggcatttcgaattacatccgccgccaacgcctgctgcgcaccagggacatcctttgcgatgacaaggaccgacgctccatctcgctgatcgccgaggaatggggtttcatggacccatcgacatacagccgcacattccggcgcgaattcgggatgacgccgaatgaagcccgcgaggcggggaggctgcaggcaaatcggccaccgagactttccgcggcgcatttcgccgaaggcggcccgccttggacgtcccttttggagagcggtgacattgcgagccgctcgtgaccgctcccacgaacatcttcccgatccccggccagaaagctcggcgcgccatcggcgtccgcgacagtctggccgcgcgtccgtggctgtgcagtttatcccatcgtcgtgcacggtatccatttctgcgcggatgggcgcaaaacccctgtcggcagggcattttccgctttccgggccgcacgttgcagaaatatgctttccgcgctgccgttggagccgaaggtctgactccggttctattcacagcttcggccatggccattgacgctttcaggagtgtgacgaatgggaattcctggcagattttctggtgcctttcttgcctcgatcatcgcagtttcgcattcaatgacggcttcggcgcaggccgacgacacaccgaaagtggcaacgatcaccgttgcgctcgaggatgtttcgccaaagcatgaattcgtcgggcgggtggaggcactgaacgccgtggatatccgatcccggatcgacggcttcgtcgatcggaggctgttcgaggaaggcgccgtggttgacgagggccaggaactcttcaagatcgacagccgcgcgcttgatatcgcacttgccgatgccaatgccaatctcgcccgcgccaaggcgacgctgctcgatgccgagcggcagatgacgcgcaaccagtccctcaaccagaccgttgcccgggcaaccatcgaacagagcgaaaccgcgcgagacaccgccgccgcgaacctgcagtctgcggaagcggccgtaaagcaggccgagctcaatctgagctacagccgcatcatgtctcccctgaaggggaggatcgggaccgctgccttctccccgggcagtttcgtcaccaccgcctcaccggcgcttgcgcgcgtcgtgcagatggatcccgtcagggtggtcttttcggtcagcgatcgcgcgctgcttgatctgcgcgaagccgccggcaatgtcagcaaggacgagctggcccagcgctaccagacgcgtctgaggctgtccaacggacagatctatccgcaaacggcgcccatttccttcctgggaaacgaggtcgatcagggaaccggaacccttgcggtccgctcggtctttccaaatggcgatttcctgctgatcccgggccaattcgtgaccgtcgtcgtctccgaaaccgcgcgaaaggaacgcccgacggttccgctcggggcggtccagcaggaccgcgagggcaaatatgtcatgctggtcacgccggaaaggaaggccacggagcgcaggatcacagtatccgagcagagagagggaagctggatcgtcgacgacgggctggcgggcggtgaaaccgtcatcgtcgaggggcttcagaacgtcgccgagggagcgatcgtcgagatcgtcccggatcagaacgcgtctcagccggcggtgtcgaaatgaacatttccgctcccttcatcggccggccacgcttcgcgatggtgatcgccgtcgtcatgctcatcgccggcgcggtcgcgctcatgcaaatcccggtggcgcaatttccgcagatcacgccgccagaagttcaggtcaccgccagctatcccggcgccaatgcgcaggtgatgaccgacagcgtcggcgcaccgatcgaggaacaggtgaacggggtcgagggcatgatgtacatgtcgtcgtcgagttccgacaacggcacctatagcctcaccgtcaccttcgaagccggaaccgacccggcgatcgcccaggtcaatgtccagaaccggctggcgctcgcgaccccccgcctgccggcggccgtcacgcaggcaggtgtcacggtgcgcagccgctcgtccagcatgctgctcggcctggcgctctactcgccgaaaggcacgcgcgacgaagtcttcatcagcaactacgcgacgatcaacattcgcgacgccatctcccgtcttcccggcgtcggcgaagccgccgttttcgggccaacctacagcatgcgcatctggatgatgccggatcgcatggaggcactgggcgtcacggccgccgatctcatgtcgctcattcgcgcccagaacgcgcaggcgtccgccgggcagatcggctcgcctccggcgatgaccggacagcagctgcagctaaccgtaacggcgcgcggacggctcgccgacgccgccgaattcggcaacatcatcgttcgcagcaatcgcgacggcggcgttgtccggctgcgcgacgtcgcccgcgtggaactcggcgcccaatcctacgacaccgcctcgacgctgaacggcaatccaagcgcgaccgtcgtcgtctaccaggcatccgatgccaacgcgcttgcggtgtcgaacgccgtgctcggtgaggtcgagcggctctcgaagcagttccccgatgatgtcgcctatacgctcgtcttcgacacgacgtccttcgtgcgcgaaacgatccgcgagatcttcgtgacgctcgccatcaccttcgtgctcgtcgtggccgtcgtcttcgcgttcctgcaggactggcgggcgaccatcatcccgacgctcaccatccctgtatccctcatcggcggcttcgccgttctctacgttctcggctattcggcaaatacgatcacgctctttgccgtcattttggcgatcagcctcgtggttgatgacgccatcatcgtcgtggagaacgcccagcgactgatgagcgaaaaggcgatggatatacgagcggccacgcttgccaccatgcagcaggtcaccggaccgatcgtcgcaaccacgcttgttctcgccgcactcttcatcccggtggcattcctggccggcatcaccggcgaactctaccgccagtttgccgtcaccatcctcgtgaccgtggttttttcgaccatcaacgcgctcaccctcagcccggcgctctgcgtgctgatcctgagacccgcccctgaacgcaagacgggccttttcggccggatgaacaacggcctggaggcctcgcgccgcttctatctcgggctgtttacgatgtttgcccggcgcctcgtgctggccggtgtgctcttcgttgcggtcatcggtggtatttacggtttctaccgcgttctccccaccggcttcgtgccggccgaggaccagggctacctgttcatgaacgtgcagcttcccaatgccgcctcgctggagcgaacgcagcggacgatcgccgaggtcagcgcgcttctgcagcagacacccgggatcgccaacacgatcggcatcgccggcgtcagcatggtcggcggtggcgggtctaacagcggcatgatcatttccgcgctggagccatggagcgagcgcccctccgatcagagcgccttcgccctcatcgccaagctgcgcccccagctggcggccatctcgacggcatcgatcgtgccgttcaacccgccagcgatccccggcctcggcacgacaggcggattcgacttccgccttcaggcgcgggccggccagagccagcaggcgctggccgaggtcatgcgcgacctcatcatccaggcgaaccggacaccaggccttgccggcgtcttcagcaccttctccgccgacgtgcctcagctctatctcgacatcgaccgaaagcgggccgatctctacggcgtctcgccggcggcgatcttcagcacattgcaggcgcatctcggatcggcctatgtcgacgacttcaacattttctcgagggtttaccaggtgcggcttcaggatgagccggcctaccgccagcgcatggacgacatcctgcgcctcagggtacgcagccagtcgggcgaactcgttccgttgcagagcatggtttccattgagacgatctatgggccgagctcggtcaaccgctacaatctgttttcatccgcggccatcaacggccaggccgcggccggcacgagctccggccaggcgcttgctatcatgggcaacctcgccaacgagacaatgcccgatggcttcggcttcgaatggaccgggcttgcgcttcaggagcagcaatcgggcaacgagaccgtgatcattctcatcgctggcatcgtcttcacctatctcttcctcgtcgcgcaatacgaaagctggagcgttcctgttgccgtcatgctgtcggtcgcggtcgcggtcgtcggcgccttgggcgcgctcgccgtcggagggatcgatctcaacatctacgcccagatcggcatgctgctgctgatcggccttgcggccaagaatgcgatcctgatcgtcgaattcgccaaggagcgccgagaggaggggatgagcacccttgacgcggcctccgaagccacgtcccagcgcttcaggcccgtgctgatgaccgcgctcgcctcgatactgggtgtcgtgccgctggtcgtggcgacgggcgctggagccggcagccgccaggcgatcggcgccaccgttcttggcggcctgcttctcggcacggtgcttgggcttgtcgcgatcccggttctctacctggttgttcagagccttcgtgaagcgctcaagcagcgactgttcggtgttaaacccgatccggtcagcagcgtcgctgcggaataggtgttgccggcgaggatctacccggctcggccttcgtcgggagcggttggctcatccgtggaggccggtgcaagcgatttgaacgccccctgccccaagagcatgagccaggtgacaaggacgaatgtggaggtcaggaccggcatcccgatcggcttgaggaaaatggcgaccgatgcccagagccagctggaaatgaccgcgccgaagaccgcgtagagcaggctgcgccaggtcagcgccaggaagacgccacccagcgccatggctgtcagcgcggagttgtaaccgaagagtccgtcgcgaaccgcgccctccggaccaccgtagacggccgccaccaccgtgccaacgaccgcgccgagcagggccatcgcagcggtgacacgggaattcagcgcgatcgcgatcacgatgaggtagccggagatccagttatcctgaaagaatatctgcccgatcgatgtcccaatcccctcgtaccaggtcgcaaggacatacggcaccgtttcggaaaactgatcgggcgacacgggcttcgccatcggtcccgcatcgatcgcgtcgaatttcagcaccgcgaacagaaacagccatcccacaagaacgaaaggcatcgtgagcggcgcggtcttgtagggcgccagaaccgcccccatgcttgcgaaagccatggtcgtgaaggcggcagcgcaaacgagatagacgaccatggccacggacggtatggcacccgtgcgaaaatcctcgctcgtgaaggcgacgagcgccagccccaccagcgcgccattgaaaccgtataatccatcgcgcatgaccgccctgtcggccttcagaacaagcgcggtcgccgtgcttgagatgacgccgagcacgcagatcgcggcatagatccaggaattccacgcaagtgccgcgaggatcaccagcccggacaggggattattctgaaagacgacctggcccacgccgcgcaacgaccagtccacgaagaacagcgacggatgatcacggaaacgatccaaattcattgatctctgctccttcggccagcccgcaagcgactcatgcctcgttcgcgcggcgtgttggtccggctcgggcgcgacgccgcgccccgcctggtttgtccctagaagaggaagtatcgctgcgacatcggcaatacatccgccggctcgcaggtgatcaactggccatcgacgcggacattgtagttttgcggatcgacttccagcttcggcgtcagattgttatgcaccatgtccttcttgcgcacggttcgcgtgcccttcacggccgcgagctgcttggacagtttcagcttctcgccgatcccgtcgtccagtgccgcctgcgacacgaaggtgacgcccgtcgagccgagcgcccttccgagcacgccgtacatcggacggtagtgcaccggttgcggcgtcgagatcgaggcgttgggatcgcccatcggcgcgatagcgatcatgccgccgatcaggaccagttgcggcttgatcccgaaaaatgccggcttccagagcacgagatcggcgcgcttgccgacctggatcgagccgatctggtcggcaaacccatgcgtcagggccgggttgatcgtgtacttggcgacatagcgcttcacgcggaaattgtcgttgcgcccgctatcttcagggagcgggccgcgctgcaccttcatcttgtgcgccgtctgccagcaccgcagcgtcgtctcgccaatacgacccatcgcctgcgaatccgacgacatcatcgaaaacacgccgagatcgtggagaatgtcttccgccgcgatcgtctcgcgccggatgcgcgactccgcgaatgcgacgtcctcggggatttgcgggctcagatgatggcagaccatcagcatgtcgagatgttcgtcgacggtgttgatcgtatagggtcttgtcgggttggtggacgacggaaggacattctcctcgcccgccgctgtgatgatgtcaggcgcatgcccgccgcctgcaccttcggtgtggaagctgtggatcgtacgtcccttcatggccgcgaaggtgtcgcgcacgaaaccgctctcgttgagcgtatcgctgtgaagcgcgacctgcacgtccatctcgtcggcaaccgtcaggcaattgtcgatcgcagccggcgtcgtgccccaatcctcgtgcagcttgagcccgacaacaccggcgcgaacctgttcgcgcagcggatcgggcaggctgatattgccttttccgagcagcccgacattgatcggcagcgcttccgccgcctcaagcatgcggtgtatcgcccacgggccggccgttaccgtggtcgcgagcgtgcccaccgtcgggccggcgccgccgccgacgagcgtcgtcgtgccgctcgccagcgcctcttccgcctgttgcggggcgatgaagtgaatatgggtatcgatcccgcccgcggtgaggatcttgccttctcccgcaatgacgtcggtcgcgccgccgacgacgatggtcacgccaggctggatatccggattgcccgacttgccgatccccgagatccgtccgttcttgatgccgacatcggctttgatgatgccccagtggtcgatgatgatgacattggtgatgacgacgtcggcgacctcggcatgggggcgctgcccctgccccatgccgtcgcggatcaccttgccgccgccgaaagtcacctcttccccgtaaaccgtgcggtcttcctcgatctcgatgacgagttcggtatcggccagccgaagcctgtcgcccttggtcgggccgtagagatcggcataggtctgccttgtgatcgttcccatcatagcctcctacagcttgcccatgaccttggcgttgaacccgtaaacctcacgcttgccgtcgagcgccacgagctccaccgttcgctcctggcccggctcgaaacggaccgccgtaccggccggaatgttcagccgaaacccgcgcgtgggctcgcgatcgaaaagaagcgcctcgttcgtctcgtagaaatgatagtgggagccgacctggatcggccggtcaccggagttggcgacatcgatcttctgtgtctgcctgcccgcattgaggtcgatcgagccattctcgatgaaatattcgccgggtatcatgatggcctcctcatgggatcgggttgtggacggtgacgagcttcgtaccgtcggggaaggttgcctccacctggatgtcggggatcatctcgggcacgccctccatgacctcctcgcgggtcagcagcgtcgcgccgtaggacatcaggtccgccaccgttcgcccctcgcgcgcgccctccagcagggccgccgagatataggcgatgacctcgggataattcagcttcagacccttcgccttgcgccgctcggcgaccagtccggccgtaaagatcaggagcttgtctctttcacgcggtagcagttccatgagcttgcctccttgcttgctgttcacgttgcccagatgcgcggagcgacggccttcttcatcaggccgcgttcgcgaagaatgctccacgcttgcagaaaaagtgccttgccctcggacatccggcttccgagatatcggcagacgatcacgcggttgagctggctggccgagaagacgccgcgcgcctgcgcgccgagttcgtcgcggatatgctcgacggtgttttccagcgccggtcccgcatagaccatggttccgacgatgggctttccggcaaagaagagcggagcgtcaaggacgtccggcgctcgcgaaaacgccattcgctcgaaccagatcagctcgtcgttgcgaaaaatctcgacgcgttgggcaagccgtccgctcgcgaaaccctcgcccgcggccgggcgaccgaggctgacgaaatcccaaccgacataggccgcgtcctcgccgagcatgacgcgcgtgctgatcgaggcatccgcgccttcgaacaggatcgtctcctgcggaagattttcgcagaccgcgccggcgccgacatcgatccgtatgcgctgcgtactcgtgccgtgctcgctgcggtagaatttcgtcgcgcccggcgtggtcaggacacagcgcgcctcgggcgcaagacggcaggtgatatcgaggacatcgccgccggccacccctccgggcggatgcaggatatagacatgggcggagccgtcatcctcgggatgaaaggcgcgctgcaccgcaagcggaccgacatgccgcctgcgcatcaggcgcgttttcccgtgggagttcgcgaaccacaaatcaagctcggcatgccaaccatcgaccatcggcgaaaaacccttccaattccggcctcccggcccttcctgccactccgcaaactcgctcaagcgctttcacgccggcttgtctggtctcttcctctcgcgcccctcgcttctgtcgtgccgcgtctcttccgacagatggtgcgagctggcggtcagcttcatggcacctgccaggagcagcgccgagaccggaagcacgagcgactcccattgcggcggtgtctgcatctcacccacctgcgccgcgaagtgcacgaccagatagagaatgatcatctggaagaagaggttcttcagttccgcaacggtatcgatgatcatccactgcggcagcttcgatcgctgttccggcgggatatcgagggcaaagccgagagcgatgccgcaaccaacaaccatcagcacgatgcccaggaggatcttgtcggtggcgcgcagcaccgaaacgatgaccgacatatccgcattgagccgcgtcatcctgaaggtttccacgagcatcaagatggcctcccagaacatcaggaaagcaccgaaaagcacacccgcggcagcaagtatgagaatggaccggagaccgcggaacaacgaaatcaaggcagtattcctcctcggattgcttggactgcatgagatccggctgcttgcccggtcggagtctatgaacgaaacagccggctgtattgcgtttcatgccatgcgcttgccattgccattgccggcgccgcattgccgatctcgtcgtcgccagtcatctccgccgtgcgggccgcccgctcgatgacctcggcggccgcgatgagaagccgctgcccggcggtatgccccagcggcaccagccggatggcggccgacacctgaccctcgacagcactccacagcagcccacgcaacgcatccgccggcgcgatcttccagttgacggccgcgagcgcaaagaccgccggataggtgagcttcaccgtggtgaaggatttcgcggaggagacgccgagatcgcagagaaccgtgagcatcgacgcgcccatctgcttgtcctccagctccacctccttgctttcgcgcgcggcagaaagccatgcgtcggcctttaggaacgacgcgcgatcatccgcttcgagcgcatgcatcatgcgcaggaacagcgccgcatcgcagacggcgtagctgtgctcgatcagcctgaagatccagtcgcgcgcggtcgcctcgtcgcgaacggtccgatcgtggacggcccattcgagcccacgggaataggcgaacgcaccaaccggctggctggggctcaccagccgcagaagctgaaggggcaggccgcccgatgttggttgaaacgtcacataaatctcccgaagcgatcacccgcggccggaccgaaatccggcctacggtcttcaaatgcgtccacggttcaactcgccagcaacagcgcgccgccaagtgccgtggctccgccggcaatccgcaaggccgccgtgccgcgtgtcagccgaccggcggcaacgcccattccgattcccactgcgtgcagaagcgccgtcgccagcacaaagcccatgccgaagaacaaggcgtttgcgcctgccagttcagcgccatgcgaatgcccatggaagaatgcgaatccgccgacgattgcggcgacaagcccgggtgacgccgggcgggcgatcgcgaccaacagcccgatgacgacggacgaggcgagaatgaccggttcgacaaagggcagcggcaagccggcaagcgctgcgaagaagccaaggagcatgacgccgacgaaagccgcggggatggccagtcgtgcaccgctcccgagcatgaccgcgcacagaccgaccgcgaccatggcgagcacgtgatccgctcccgaaagaggatgcaggaagccggaaataaaggaaccgttgtcgccagagccaacatgcgcgaatgccggcgtgcttaccatcagcaacggtgcaagaatcaagagatgcatctttttcatggtacgagccttcctaaggttgatcgaacaggaacgattgacatccggtagttcaggcatttcatcgcgctcatctcgcccgcccagtcgatgagacctgttcagaacgagccgaacatcgacccgagcacgaagaccgcgacaagcgagatgatgacgccgacgatcacggtcatcaccatgtcgaaatagcttccggcatgtgtctgcctgctgatctgcaggagcagaagcacggtgccgttgtgaggcagtgcatcgagcgtcccggcgctgatggtcgtcaggcgatgcatgagcgcgggatcgatgccatactcagcagcaagacgcatgtattcggcgccgagcgcattgagcgcgatggccatgccgccggaagccgtccccgttagcgcggccagcgcgttcatcgccacgaccagcgaaacaagcgggccgccaggcatctgcaagacggcatcgcgcaccacattgaaagccggcatggcagcgacaaccgcgccgaaaccgacgaggcttgcaacggtcatgatcggcaggacagccgagttggcgcccgcgtcgagactttcgcgcaatgcgcccagccgtccatagttggcggcgatcacggtgacgatcgccgcggccagcgcaatgaggaccgcccacacgccgagcgtggaggtgatgttgatgccaagcgcggcttcggcgctggagaagtcgatccggggcagcaccacgagtgccatcaggaaattgacgctgatgacgacaatcagcggcagcaccgcgaagaggaaggacgggccctcatcgctcttcttgccatgggtgagctcgctcgggtcgaagtcgcccgaggtcgttgcctgttcgcgcaccttttccgtgatgatgacgggcgtctcatcctccgtgtatccttcgttggcggcgcgggctttggcctcgatgcgcgccagccaccacattccgaacgcgaaggtgatgatcgaggcgatgataccgaggcccggcgcggcgaaggtcgtcgtgccgaagtacggcatcgggatggcgttgttcgtcgagggggtaccgggcatcgccgacatggtgaaggtgaaggcgccgaggccgatcgccgccggcatcagccgcgccgggatattcgccgcgcgaaacatctcccgcgccattggcacgagcacgaagaaagcgacgaacacgctgacaccgccataggtgacaacggcggatgccagcaccacggagagcatggttcgcttcacgcccagccgctccgtcaggaaacgggcgatcgacgtgatggacccgctgtcatccatcatcttgccgaagatgccgcccagcaggaacatcgggaaccactgcgtgacgaagcgcgccgtgcccatcatgaaggtcgaggtccaatgcggaagcaacggctggccggaggccgcggcaacgacaagggcagccgctggcgccaggaggagcacgctccatccgcgataggcgaaccacatcagcaatccgagtccaagcagaattccaaacagccccatggatccgcctctcaatccgatcaggccagctcagatgccccgcgatccatagccttacgcccgtcaaggtgcagctaagtgcgcggtacaactcacggccctatctggttttcatgaaccacgcccgcggatgtgtcgaccggtgacacgcgcaaagtccctggccgccggaagaaatggacgccgtgctcacttctgggatttcgtaccaatcaagccgcgcaggctgtcaccgttggaaggcgagcgcatttgccaattcatgcgcggacaccatcgcgacagggttggcgccaccagcgacgcctatcgataacagcgcttgttgtattcctcaggagcattataacgtacacgccaaccgaacattccgaagccctcatgtcatcgaattccgaccgggtagacatcgcccatcgcaccctcagacaagccatcatcgagcaggcgctgaaagccggcaccaagctgccggaagacgagatcggccggcacttttccatgagccgcacgctggtgcgcgccgtgctggccaagctacaggcgcaggggctggtcgacacctatcacaagcgcaccgcaacggtggcccagccgagccttgaggaagcgcgcgacgcgttcgccgtacgccgcgcactggaacgcgaggtgatgaaggcggtggtcaagcgctggagccccgccatcgagaagagcctgcgcgagcacgtgcaggaagaggaagcggctcacgccaagggtgacgtccggctttcgacgcggctggccggcgagttccatctgaagcttgccgaccttgcgggcaacgcgctgctggagcgctatctttccgaactcgtgtcgcgctgttcgctgatccttgccatgtacagccgcccgcattccagcgaatgcgccatcagcgagcactccggactcatcggcgcgctcaagaaaggggatatcgccgcggcagagcgcctgatggacgatcacctctcatccgtggaaagccgggccctcttcgaggacgaggcagctgtcgagcccgatctcggttcgatcctctcgcgcttctccgcccgcgaagcgagctgactgccgctttttcaatcacgtatacatggttttgcattttatgtagacgaaaaatcgtcgatcataatttgagcgggcacgcatgaccaggtgtcggggccactttatctgaatgaatccatacgtctagcgcacaagcgtcgggctcaagacgtcgatcgatacggactggcatcaatgttgcatacgtgattatagagatcatgtagccaagattgtcatcatgccaccatcgccacataccgaacatagatccgaacatcggctcgaactgcgcggcatccgcaaggcctatccggccgtggtcgccaatgacgggatcgacctccgtgtccgccccggcgagatccatgccgtggtcggcgagaacggagccggcaagtcgacgctgatgaagatcatctatggcatggtgcggccggattccggcgaactcctgtgggatgggcgcgaagtatcgatcgcttcgcccgccgatgcacagaagctcggcatcggcatggtgttccagcacttcgcgctgttcgacacgctgtcggtggcggaaaacatcgcgctggcgcttccgggacggccggcgatcgagccgttgtcgcgacggatcgcggaggtcgcggcgcgttatggtctgccggtcgagcccggccgccatatctacacgatgtcggtcggcgagcggcagcgggtcgagatcatccgcgcgctgttgcagaatccacgcttgctcattctcgacgagccgacctcggtgctgacgccgcaggcggtcgaaacgctgttcgtcacgctgcgccagatcgcggccgagggatgcagcattctctatatcagccacaagctgaacgagatcagggatctctgccacacggccacgatccttcgcggcggccgggtgaccggcatgtgcgacccgaggcaggaaagcccggcctcgatggcccgcatgatgatcggcgccgatctgcccggctttcgtcatcgcggccacacgccggccagtaaaacgcgcctcagcgtttccggcctgacgcttcccacccaggacccgttcggaacggcgctcgccgatatcggctttacggtgcgcggcggtgagatcctcgggatcgccggcgtctcgggcaatggccagcaggagttgctggcggcactgtcgggcgaaacgccactgtcgaacgccggcgcgatcaccatcgacggcatgtcggcgggtgatcgcgatccggccgggcggcggcggcttggtctctgctccgttccagaggatcggctcaagcaaggttccgtcccctcgctgccgctcctggagaacgtgctgctcaccgccaatcgcaacggcgccgttcgcgccggcctcattcgcttcgatcgcgtcaaggcctatgccgagcgctgcatcgaggccttcgacgtcaggacgcccggcgcgcaggcgcccgccggcagcctgtcgggcggcaatctccagaagttcatcatcggtcgcgagatcttgcaggaaccgggcgtgttgatcgtctcgcaaccgacctggggcgtggacgtcggcgcggcactggtcatccgccaggcgctgctcgacctgcgcgatcggggtgcggcgatcgtcgtcatatccgaggaactcgacgaacttttcgagatttccgaccagatcgccgttatagccggcggccggctgacggcggccataccgatcgcggaggcgaaccgcgatgcgatcggtatcgccatgtccggccaaggtgccggcgatgccccagacgaacgcgccagcaaggagcttgcccatgcgctttgaaccgcgccccaacccctcgcgcatcatgatcctgatgtcgccggtcatcgcgatcgcgctgacgtcgatcgtcgccatggcgctctttgcccttgccgggctgaatccactggaggcgctgatcacctttctgaccgcaccgctcgccgatctctatggtttcggcgaactccttatcaaggccgctcccctggtgctgatcggtgtcgggctcgcgatcggctttcgcgccggcatctggaacgtcggcgcggaagggcagttgaccgtgggcgtcatcttcgccggctatgtggcgctgaactacggcgcgaccggcggctggtgggttctgcccgcgatggtcatcgccggcgccgtcggcggcgtcctctgggctgccatccccgcactgctccggaccaggttcaatgccagcgaaatcctggtcagcctgatgctcaattatgtcgcggcgctctggctttcatggttggtcttcggtctgtggcgcgacccggccggattcaacttcccgcagtcggaaccgctggcgccggatgccctcttcccgatcctgatcgaaaacacccgcgccaatgtcagcgtgctcttcgcgctcggcgcggtgctggccggctggctgctcatgaaccgcagcttcgccggcttccagctcaaggttaccggcctctccgaaggagccgcgcgctacgccggcttcagcgtcagacgcgcggtctggatcggcatgctggcgagcggtgccgcggcaggcatcgcgggcgtcggggagatcgccgggcccctcgcccagatcttcccgaccgcatcgcccggctatggctacgcggcgatcatcgtcgcctttctcgggcgactgcacccggtgggcatcctgctctccggcctactgatggctttgctctatctctcgggcgacgtcgcgcagatgtcgctcggcatgccgtcttcgatcaccggcctgctgcagagcacgctgctcttcttcctgctgacgacggacgtcttcattcagtaccgcgtccgcttccagtcctccaaccggcagggagccgccgcctgatggaccagatccttcccattctcgtggccacgctcgttgccggcacgccgctgatctatgccgcgctcggtgaactcgtagccgaacgctccggcgtcctcaacatgggtgtcgagggcatgatggtcatcggcgcggtaatcgccttcatcgtcatgatggcgacaggcagcctgtggctcgccgtattcgcggccatgctggcggccatgctgcttgccctgatgttcgccgttctcgccgtcggcttccgcgccaatcagatcgcggtcgggctggcattgacgatcttcggcaccagcctcgcctcgttcatcggcaagccctacatcggaaaggcgatcgtgatggagccttccacagcgtccaaccttgccgcgaaaatcccgttcctgggcgcggttctcggccagcttcatccgctcgtctggctctcctggatcttctttggcggcgtctggtatttcctgaaccgcagccgcagcggcctgatcctgcgcgccgtcggcgaatcgcccacctccgcccacgcgctcggctatccggtcaacacgatccgttacctcgccacgctgttcggcggcgccagcgccggcatcgcgggcgcctatgtgtcgatcgtctacacctcgctttggaccgagggactgatcgccgggcgcggctggatcgccgtggcgctcgtcgtcttttccacctggcggtcgggccgctgctttctcggcgcctatctgttcggcggcgccaccatcgcccagctctttgcccagagcgccggcatcggcctgccgtccgagctcatgtccgcccttccctatctcgtgaccatcgtcgtgctggtgctgatctcgcgcaacgccgcgctgatgcgcctcaacgtccccgcttccctcggcaagccattcgccgccgagggctgaaaccgccgccaatcatccaaaccgaaaatcaacagagggaaccgaaatgactacattctccagacgcgacttcctgagaaccagcgccgccggcgcccttgcgctcggcgccggtgcgagaccgctcctggccgccgatgagcctctcaaggtcggcgtcatccacatgggcgccatttccgatacgggctgggaatacttccaggccaacgcctggaaagccctcgaaaaggaattcggcgacagggtgaaggtgacggtgcttgaaaacatcgcccaggtgcaggatagcgaacggctgttccggcagctctccgcccagggcaacaagctgatcttcggcaccaccttctcgcaatacgcctcgctgaagaagcttgcgccgacactgcccaaatcgcatttcgagtgctgcgccggcatcgaggcgggcaacaatctcggcgtcttcgaagcccgccactatgaaggcacctacattaccggcatcgccgccggccgcacgaccaagaccaacgtgctcggatgggtcggcgccttcccggtgccgcaggtcatctacagcctcaacgctttcctgctcggcgcccgctcggtcaaccccgacgtgacgctgaaagtcgtctgggccaatgcctgggtcgatcccggcaaggaaaaggacgctgtcgcggcactgatcgcgcagggcgccgacgtcatttccggcagccccaacacaccggtgcagggattggctgccgaggagaagggcgtctggtcgatcggctcgaccggtgatttttccgcctatgtaaagaagaagcagctcgtttccttcgaactggattggagctccgcccatatcaacgccgccaaggccgtgatggccggcacctggaagccggaaagccgctggctgggcctcggaccgggcggctatgtcaagatgacgacaagcaatccggacctgccggaagccatcgccgccgaaatgaaggccgccgaagccgcgatcatcagcggcaagctgaagccctttgccggcgagatcaaggatcagagcggcaatgtgaaggtcgccaagggccaggagcttgccgatgccgacatcagagccatgacgtggctgatcgaaggtgtgcagggaaccctgccgcagaactgatcgccgccccgtgcgatcaaacgatacagcttctcccctcacccttgaggggagaagcatctcaatgacaacagaacaaagacatcaagggagaccccggtgaccgaaacactgttcacgaacgccaggctggccgacggcacgctcaacgacattctcgtctcgggtggccgcatctcggcgatcgacaaggccggcaaaagcgcagccacggcgaagaccgtcgacattgccggcgcacttctggttccgagtttcgtcgagggacacatccatctcgacaccagcttttacggcgacaagtggatcccgcacaaagcctgcacgaacggcttcgacgtgcatgaacgcgtcgccttccaggccgagaacatggccgccgcagcgccgatggacgagcgcgcccgcaaccagctcgacctgtgcatcgcaaacggcgcgctgcagatgcgcagccatgtcatggtcgatggctcggtcgggctgaagtcgctggagaccattctggccgtccgcgaggcctacagggacatcatcgatatccagctcgtggcattcccgcagagcggaatcctgaaaagccccggcacgcccgagctgatggacgaagcgatcggcatgggcgccgacctcgtcggggggctagatccgctctctttcgatcgtgacatcaaggggcatctcgacgtggtcttcgggattgccgaaaagcgcggggtcgatgtcgacatccatcttcatgacgccggcacgatgggcgcgatgaccatcgaggagatctgcgcgcgcacgacagcactcggcatgcaggggcgggtcgcggtgagccacgcctatggtctcggcgatctcggtcccgatgcgatcaagaagatcgccgctctcattgccaagagcggcgtcgcgatcatgaccaacgcgcccggcaaccacaatttcccgcccgtggcgctgctgcgcgcggccggtgtcacggtgttttcgggcaacgacaacatccgtgactcctggtggcccttcggcgacggcgacatgctgcgacgcgccgagatcatcgcctaccgttccggcttctacaccgacgcagagctggccgccgcatttgacgtggtgacagcgggaggcgccaaggcgctcaacctggaaggctacggcatcgccatcggtgccaaggccgacttcgtgacgctcgccgccgaacatgtggcggaggcggtcgtcgccattccgaagccccgccgcgtcttcaaggaaggcaggctggtcgccgagaacggcgccgtggtgcgctgatgaaccatcggagccggcagacagagactgccgtcgcgcaatcgcgcgatggcatggtgacgacgccgcactggctggccagcgaagccggcgccagggtgctggcgcgcggcggcaatgcgatcgaggcgctggtcgcggcgggcgccgcgctctccgtcgtctacccgcatttctgcggtctcggcggtgacgccgtctggatggtctgcgaccgggacggcgatgcacgaacgtttctcggcatcgggcaggcagccgcgaatatccatgtcgacggcccgatcccgtcgcgcggtccggcttcgacgctgaccacggcgtgcctggtcgacagctgggagaaggtgctcgatcactcggcagcggcctggggcggcgcggagcagctacccgcattgctcgatgatgccatcgcgctcgcggaagacggcttcgccgtcagtccatcgcaaacgttctggcacgattttcgcgcggctgaatccgagacatggccgggctttagcgatctcttccagcgcgacggcatacagcgtcagccggctttggcgcgaaccctccagacaattgccgatagtgggctcagggaattctacgagggcgcgctggcggaccggatcgcgcgggggctttccgccgtcggatcaccgctgacgatcgccgatctcgcggcgacgcgaaccagggtcgcggagccggtgcgccttgcctacggcgacactgttctgctggcgccgccgccgccgacccagggcgtgaccacgctggcgatcatgggcgtgctcgcgcaacaggccgcgaaggacaaggcgcccgacagcgccgcctattatcacgcgctggtggaatccgtgaagcaggcctttgtcgaccgccacctgatcggcgatccggagttcggccccgacgccacgaaaatgcttctcgatcccgggcgcctggccagaaaagctgcggcgatcgatcccaaccgcgccgccgactggcctgtgccgtacagccagggcgacaccgcgcttctggccgcggtcgatgccgatggccgggccgcgtgcgtattgcaaagcatctatttcgattggggcagcggcgtggttgccggcgacaccggcattctctggcagaaccggggagcagccttcagcaccgaccccgccagcccgaaccgcattcgctcgggcaagcgacccttttacacgctcaaccccggcatggcgctcaaggacgggcgcccgcacctggtctacgggacacagggtgccgatggccagccgcagacgctggcgctgttgctaagcctgctgatcgaccatcatcttgatccgctggccgcgctgtcgcggccgcgtttcctgctcggccggaccttttcagatagccgcgacaatctgaagatcgaggagaatatcggcgccgacacgctcgcagcgctcggctccatgggccacgaagtcgcgaccatcgccccgctcagcccgctcggcggccaggccggcgtcatccgcatccatgcggatggaggaatggaggctgcccacgacccccgcagcgacggcggagccatcggtctatgagcatgcagcgcgacagacttttcgacctcgtcatccgcgatgtccgagtggcggaggatggcgtcctcgtcgacatcgcggtgcgtgatggcctcatcgccgcgatcgagccacgcctcagctgcgacgccgtctcggacttcgatggcaagggcagctttgccttcggcggtttcgtcgacacgcatgtgcatctggacaaggcctgcatcctcgatcgctgctcgatctgtgagggaacacttgcagaggcggtgcgcgagacagcccgcgcaaagcccggctttaccgaggaagacgtttacgagcgagccgcgcgcgtcgtcgaaagagccatctcgcacggcacggtgcggatgcggaccttcgtcgagatcgatccccgcgctggtttccgctccttcgaggcagtcaagcgtatccgcgcggattatgccttcgcgatcgatatcgagatctgcgcattcgcgcaggacggcctcaccaacgagacagacacttggaagatgctcgacgcggcactttccgatggcgccgatctcatcggcggctgcccctacacagatcccgatcctgaagcgcatatcgcgcgcatcttcgagctcgcggagaaacacgacgtcgccgtcgacttccatctcgacttcagcctcgaccccgacaagaccgacctgccggccgtcatcgcggccacgaaacgccacggctggcaaggccgcgtctccatcggtcacgtcaccaatctctcggcattaccggaagcatccgtgatcgagatcgcgaacgccctgacagaagcaggcattgccctgacggttcttccggccacggatctcttcctgaatggccgcgctcacgagcggctggtgccacgtggcgtcgctcccgcccatatcctcgccgcgcagggcgtcgtcgcctcgatcgccaccaacaacgtgctcaaccccttcacgccttttggcgatgcctcgctgatccggatggccaatctctatgccaacgtcgcccaactctcgcgcgacgccgagatcgcgggcgttttcgacatggttggacgatccgccgcgcgccagctcggcattccctacgggcttgcggtgggtaacgacgccacgatcatcctcatcgacgcagcgggaccgaaagccgccgtgcgcgaggtcggaaggatcgtggccggctggaaaagcggtcgccagagcttcgacaacggccggccgcagatccacaagccggacagacagtgatccccgacgccgactaacgatcgagcatctgctggaaccgctgcagctcggcggcatccatgttgacgacgtggcggccttccggataggcggcagacgctacatcgccgacatactcccggaaggccgcgatcctctccgactgaagccgctcgtattcggcggcgaaattgcgatagaccttggaatggcgcgggacatgccccttcgtctgcccgagaatatcgtccgcgaaaagatattgcgcgtcgcacccggcgcccgcgcccatcgatagcatgatgagtgacgtgcgctgggaaatggcggtggcgacttcgacgggcacgacctcgatttccgcaccgacggcgcctgccgcctcgagctgtcgaacggcctcgaaaacgtgcatggcctgttcggccgtcttgccgactgccttgaagcctcccgtccacgtggcgcgcgatggaatgagcccgacatgaccgacgaccggaatggcctcgtcggccattcgcctgatggtcgccaggctcgcgctgcaatagacggcatcggcgctcgccttgtagacgcggaaggcccaccgcacgaaatcgtcggcggtgcctatctcgtagaaattatccccgggcatcgtgaagaggtttggcgccgcgtcccggtagcggggatcgcaaaccaactccggcggaacggagacgatgtcgacgccggccttgtcggcggcctcggcctcctcgagcgtcaggacgcgcagcatcgtcaactgccgcttgcccttcatcgatctcaaatctgcaacggttggtcttgcctggcgcataattacctctcgggggtggcgaacgtgtcagccgatcatgatccgcacgctgtcggcttcgatctggacgggataggttcgcaggttcacgcaaacgggagcgcccttggcctccccggtcttgtagttgaagcggccgttatgcttgggacactcgataatctctcccatgacaaggccatcggcgagatgcaccttttcatgcgtgcaaagaccgtcggtcgcgaaatattcgtcgtcctccgaccgataaatcgcgaacgtctggccgccatgatcaaaccggataaggtcttccggctcgatatcgccgaccttgcatacttcaatccacattccgctcgacttccttattcggcggcgcgtgtcgcgccatcaaggtgatgaaactcgtccttgtagggccgagcagttgggggcagttcgcgcttgaggaaataatcctcgtttcgcaactgccggatcagcaccgggaacacctccctgtaggcgtgccacatcgatgggttgggcgcgggaaggtcgtgcttgatgagcgcgtgcagtctcggcagcgcgtgaaacggcaccatcgggaacatgtggtgctcgacatggtagttcatgttccagtagatgaaccggctgatcgggttcatgtagaccgtgcgtgtattcagccggtggtcgatcacgttatccgccaagccgatatgctgcagcaggccggtcaggaccatgtgccagcagccgtaaagacgcggcagccctatcagtagcaggggcaggatcgagccgatgataagcgagaccgcgatcgtcgcgacgtagatggcgatgtggatgcgcgccgcgaagaccaccttcgcccattcgctttcggggacgaatgtcttctcctccgccgtcacgctgccgcagctgtttcgcaacagggcgatcatcgagtaccaggcgtccagaatgccgaagaaattgacgaccacccggagcagatccggcgggcgcatgacggcaatctccgcatcgcgcccgacgatggtcgtatcggtgtgatggcgtgcatggctccagcgccaggtcaccggattgcgcatcagcatgaagctggcgatctgatagatcacatcgttcatccagcgggtcttgaaggccgtcccgtggccgcattcatgccagcgggaatccgacgaggaaccgtagagaaccccatagacgaaaaggaagggaatgctcaaccagctgggccagaagtagatcgcgcctgccgccgaaacggcgaacgcggcaaaccagatcagcgtatcgcggatggcgggcaggtcggagcgctgcatcagctccttcatcgtcttgcgcggcacctcggtgtgataccaatccgccgacgccaacccgatctcgatcgctcgtttcgtgctttcgccgacgagactgtaatcgcgcttcatcatgatcttttcttgctgttggtctgtcattgcaaagtcacctcgaagaggtgcccggtgtggcgtcagcgcgccgaccgagcatgggaaaaacattcgatggttcgggaaagtctgcgtcaggcgccgttgcgacggatgcgatcctgctctgtgcggcctccaacgcgccgcgcccgtcaagaatgcggaaggtcaaactgtatggacgctcatcgccatgcgagagccagacgatctcgtcgcgttcgcgggcgaagttttctccaaggacatgattggtcgagggttctattcccaaggcatattgcccggcctgatagttttgccagacataggcgcagggaagctgctccctgacggtctcgatctccagacccagctgcaaccggtcgttcatgacggcaacaggtacgcgccccgccgtatcggcggccatggcgtgctgccagacttgttcgcgaaacgcttgccgcggcgcgaccgccgttcgatagcccgcttcctgctttcgaaaatcagcgcctgcatgcgacgcccagaccacgtcttcgatcggcgccagatatcgcgtgccggcgtcgagcaaggggtagctgacattgatgtggtagaacagcatatgcggcgtcggcatgaagccctggttgatcacccgatccgtcaccctgatttcatcgccgcccacatcggcttcgatccggcgcaccagatgcagattctcgccaaagaccgcggcctgttgcacgacgccttcggcccacaggacgcagcgatcctcgaaccagctttcgccatagccgaccagacgagccgggatgttgccgacccgcccgtgcagcgaatggcgaatggtttgcttgcccggatagttgaaatgcgcggcggagacctcttccgggccgaggatgtgatcgaggccgcaggtcaccagcaaccccgaaaacgaccgcgcccaggccaatccaccctcgccctcgtattcatggagggcaggattgcgaaagccggttggcgagttccaggcgatcccgagccctttgtagtcgcaatcgccgatgtccatcgcccgatcgaccagcaccgtgaaacgcaagccgcttcccgtccggaattccaatatgcggacgccgcgctcgacgccatcagagagcgtcatcaggcgcaccccggcgacctgcgacaggctgcccgctcgctcggcgagctggcggcggcttagcgtctgaccgtaaagttccaccatcgccgcctcagtgtcccgccgcttcgcccgccagggcggacttgtcgacacccatgatgagactttcgaccgtcagcagattcgtctcggccaccaccaattccgaaaccacctcgccgcgtcgcatgacgacgatgcggtcggccacctggaagacgtgatggatattgtgtgtgatgaagaggacagaatggcctgcctggcgcatgtccctgacgaaacgcaacacaccatgcgtctcctcgacgccgagattgttggtcggttcgtcgagaatgatgaccttcgcggcgaattgcatcgcgcgcgagatggcgatcgactgcctctcgccgcccgacagcgtgttgacggcggcatccgcatcgagcttcttggaaatgccgacccgcttcagaagcgtggaagcggcctccctgagcttcgcgaggtccatcggcgcgagaacgccaagccatgacgatgttgtcggctcacgaccgagaaacaggttgcgagcgatgctgagatcgggcgcaagcgaggtatcctgatggatggtctcgatgccgagatccatggcctcgcgcggcgacttcacggacaccctctggccagcaacgaatatgttgccgccatcggcaggatgaatgccggaaatggccttgatcagggtagacttgcctgcgccgttgtcgccgagcagagccacgacctcgccctcgttcaacgagaaggaggcgttgcgcagcgcgcggacattgccaaaggatttctgcacgttttccagtcgaagaacctcggacatcccttcagctccttgcgaccgttttctgcagcagcgcgtgcaggatgagcatgacgaggatgatgccgccgacgaatatgttgtaggcgaggccaggtacgccgatcagcacgatgccgttgcggatggcgcgcagcatgagaacgccgacgactgtgccaaggatcgtgccgcgcccgccggtcagcgccgtgccgccgaccacgaccatcgcgatgacctccagctcgtagcctgtgccggcaaccggcgaagccgccgatatgcggaaggcgctgatcatgccggcgagacccgcgagaacggacgtcagaatgaacagccagatcttgacgctatcggcgggtacgccacgggcgatggcggcattgcggttcgagccgatggccgaaatccagttgccaagcttcgcgaagcgcaacacataggtcgcggccagagccagtgcgatgaaccacagcagggaaacgtagagcctgaatggcccgatcatgaaatcgccggcgagaagcgtgacgaaaatgccgggctgatcccaggacttcagcggaaagccctgggtgatgtaaagagcgacgccgcgaatgatcagcaacatcgacagggttacgaggaaagacgagatcttgaccttggtgacgatcagaccgttgatcgcgccgatgaggacgcagagcaggagaccagctagcagcgagaacccgatcccccagtccgcattttgcaccagcagggtgacgatgacgggcgcgagcccgaagaccgcgcccaccgagagatcgaactcgccagccgtcagcaacagcgtcatgccgagcgcgatgatgccgagttcaggcaggaaggccagcatgttggacaggttgagcggcgacaggaagttgtcgttggccaccgcgaacgccacgagcaccacgatcaggatgatgagcgaggcaatttccggggaacggccgatgacaggcaatcccctttcccttgttgtcgtcgccgatgtcagcatcgtcatgtttcgtgctctctatcgccagatgcctgtcttcagtgcctgtcccgtcacttcttgtcgtagagcttcaggatggggtcgacgctgctggcgtcgtaaaggctgaacgtctggatgtcgtagccgatcggctcgccggcggcggcgagcgacaggagcgaaacgggcatgaagccctgggccgacggatactgccaggcggccgcgctgacatagccggccttgaccgcctcggccgtcgccttcgaattgccccagcccacgaccgggatcttgccgggggcaagacccgcgctgtcgaagacctgcttgacgctggcggcgacggaatcgccgagcgcgatgatcgccggcggattgttggcgagcatgtagtcgctcatcttcgagatgatgcccgccggatcggtgccgcaatcaacgacatcgtacttgatgccgagcggatcgaagacgctggcgatgccttccgtctccagctgctgatagcttgcgccgggaacctcgacgggaagaaagaccgtatcacctttcttcaccgccttcttgtcgaccaggtactgggcccacatgacaccggccgccttcagatcggcgccgacataggcttgccgcgccgtcgacgtgtcgtcggtgttgaagaacacgaccggaatgccggctgcccgcgcatccttgacctcaccggtccaaagacctggctgcgccgatgtggtcgctatgccgtcggctttcgcggcgatcgccgagcgaaatgcctctttctgtgaggccatgtcgccgccgctgaacgaaatcttgcaagtgaccttcaactggtcgcaagccttctgcgctccggcgttccaatccagccagaaggcatcggatgggccgccgtgcgacagcagatagaaggtcttctggccttcggcggcctgcgccgagggggccgcgaacgccagggcaaggcccgcggcgatggcaagcgtcgcatggaatcgcatgatcaatcctcccgatcggccgatcctctggccggagaccaaacccttggcgcaaccgctggatggcgtttcctctcggacttcctcctgtcgtcgagaaaatgacatcaccgcctccctgccgcgacatctaatttgatgaataaagatggcttaagctcctgtcaacatcaaaacaaatcataaaacatcattcctgatttcgaacatgacgtcatcacttgacagccgaccgtttgtggccaattgaatggagcattgcatcaattcgcatcaacatggccttgcaacgaggccgcagcgatcgaaaggtccacggttgcggtccaccatcctagatatcgcgcgcgaagccggcgtctccccggctaccgtcgatcgcgtcctgaacaaccggcccggcgtgaaactgcgcaccaagcaggtcgttctcgccgccgcgcagaagctcgactactccgccgaggccgatggcgcgcctgttgccgtcaattcggctaagatcaggctgcacttcgcactgccggccggcagcaacgccttcatcatgacattccggcggcaaatcgaaattctcgcggcggcgcgcccggaactcgacgtttccgtcctgatgatcgaaggtttcagccccgattcactggcgcgcacgctgagggaactcgagggccagacggacggcgtgggcgtcatcgcgctcgatcatccgaccgtgcgcgaagcgatccgctcgctcgcggcgagcggcgtcaaggtcgcgaccgtcgtctccgacatctcgcatgtgccgcgtaccgcctatatcggcatcgacaacagagcggccggccgactggccggctatctcctcagccgtttcatcgggtcacgcccaaacgccaaagtggcgttgctggcaggctctctctcctatcggggccatgaggaacgcgagatgggcttccgccatatcctgaaggaggaattccagtcgatcgagatcgtcgagatcagggagatgctggatgaccaggatcgggcctacgccgaagcgacggcccttctcgagaaacatccggacctcgcagggatctataatgtcggcgccggcagcatggggataggcaaggcgctcaaggaccgcaatctccagtcctcgatcgtcttcgtcggccatgacgcgacggaagacaccaaaccactgctgctcgacggcaccatggatgcggcaatcgaccagaacccgagggtcgaggcgcgcgaatcgctcaatatcctcacccatgccgtgcgcggccttccctatgaaggccatccaccgcgactgcaggtgattttcaaggaaaacatccccgaattctagactggcggacgtggcgcgccctcgcgtgaggaggacgcgccgtgttgctcagagaccctgcgcgcgaagcttcccgtccaggaacttcttggcgcgcggcacgtcggattcgtccagatgctcgatgatcatcgggatattggggtgcttctgcgcgaggcgcttcagatagaggtcgtagttcagcgagccgagccctggggcgggcagttcgatctcgccgacaccacggaacgtatggctctcggacgcgttttcgtcgccgatatcggcatgcttctcgctcttgtcgtcgcccgagcgcttcacatccttggcatgaccgatcttgatcttgtcggagagcgtgtcgaacacctggttcaggatcgcgtccatgcggtcgatattgtgggtttcgaaatagttggtcgggtccatcaacaggccaaggccgggatggtcaacctgcgcgaacatcctgacggtttcctcgaccgagccgacgacgttgttcacgtaggtttcgagcagaaacatcgcgccatgatcataggcaaactgcgcgagatcggcgaccaccttgcggcactcttcgaagccctcttcggtcttgttcttcggatgatgaacccagtcggattccgtgttgaacgtgccggtctccgagatcacgtagggcgtgccgagatactgggcgtggcggatgatttccttgaggtagccgacccggcgctctcgctccgccttgtcggggtgaatgatgttcgtatagccggaaatgcaggagatcggcaggttttgatcgcgaaatgcctcgcggatacggacgcatttctcccgggtgatctggcccgccgaaacgtcgacgtccttgaaatgcatgtcgagctggacggtattgaaaccaagcgcccggatcttggcggcggtctcatcgagaccataggggaaatagccggtgaatatgcctgtctgcatcatgatgtcgttcctccctcggaattcatgaatggattgggatttcgtcgagtttgacggtacggccgctcgccatggacctgtagccggcctccaccagcgccatggtcttgacattgtcggcgaccgacaaggccggagcctcgccgctcttgatcgcatgttgcaactgctccatgacgccgatgaaagcctgcgggaaccacatcgtctcccagctcggcgtcacccatttgccgtccgttgcgtgccgcgacgcgtaggtaagtgtcgatggttggccatggggccagccgatcgtgccttgggcgacgccggcggtgccctcgacgcgccatttgatgtagttgtcgctgtcgaagccctcttcgcgcggcccggcccagacgtcctccatcgacacggcaagcacattgcccgggaatctcatggtcgataccgtgatgccgtccttgtgggcgaaggcggtgcgcggatcgatacgagagaccgtgctgatctcttcggggtcgccgaagagaaagcgcaggacgtcgaggtgatgcacgctcatattggcgagcgtcagccggtcatatccttccagaaatccctgccagtgtggaatggcgcgcatctcgatcgttgccatcacgacgtcgccgagatcgccgcgatcgaggatctgcttgaggacgcgcatggactgatcgtagcgcatgttctgattgaccgagagaatcctcccggcccgcgccgcctcgtcgcgcagcgcgatcgcttcctccagcgaaagagcaagcggcttctgcgccagaatggcctttatgtgcggcgcctgaagcgccttgcggatgagggccggttgctggtccggcggaaatgcgagatcgacgatatcgacgttctcgtcggcgatcagcgcctccggtgtgtcgtgaaccgtcgggatgtcccagcgcctggcgacagcctcggcctttgacctggttctcgacgcaatcgcgacgaccggaaagccggcttgcctgtaggcggcgagatgacactccgccatgatcatgccggcgccgatgcagccgatgcgatagtcgcgggcacggatcggcggatccggcgtgaaacccttggtgtctgacatgtttcctcccaactccctgttcatttaccgagccagcgcctcacccgccgacccgaagaaatgcatcctcgtcggatcgcaactcagtgcgacggcgctatcaggttcgagccgcggctgaccgcgcatcagagccctcagtttctggctgcccgtatcgatcgtgaccaccgtatagccaccgagcggctccacttcgaacacccgcgccggctggccgtcgcgaccatccgtccagggctcgaccttgagatcctccggcctgatgccaatccccgacacagccttcggcagcacctcccccggcacgccgatggttccctgcgcaaatcgcgggctaccacggtggtctccatcgagttccgccgccatgatgttcatgaccggcgcgccaagcaagcgcgccacatactggctggccggcctgtcatagatttcgaccggcgatccgatctggcggatatggccgttttccatgatcgccatgcggtcggcgaccgacatcgcctcttcctggtcgtgggtcacatagatcagcgtctggccgagttcgccctgaatgcgcttgagttcgacgcgcgtttcctcgcgaagcctggcgtcgagcgcggaaatcgggtcgtccatcagataggcaaccggatcgcgcaccagagcacgggcgatggcgacacgctgacgctcgccgccggaaagctgcgccggcggcttgtgcagcagatgcgcgatgtgcagcttggcggcgacggcatcgacgcgctccctgatcttcacttccggcacgttgcgctcgacgagtgggaagcggacgttgtcgccggcgctcatatgcgggaaaagcgccaggttctggaacaccatggcgacgttgcgcgcggccggcgagatgtcgttgaccggctgtccgccgatcagcacctcgccctcgtcgggcctttccagcccgaggatcagcttgaggatcgtcgacttgcccgacagtggcggcccgaagaagcagaagaactcgccggccttgatgtcgaaggacgcattctggaccgcgacggtcttgccgtaggacttagagacgtttcgaaaggatatgccagccatcagcccaccttttgaatcgcggcgccgctcgcggcatcaaaaagccgcacggcatccggctcgaccacgacatgcgccaccgcgcccgctgcaagcccgacattgttgtcgagcaccgccttgaccgcctgttcgccgaagccgagatggacgatcgtgcgcgcgccgatgcgctcgacgaaggtgaccggcatggcgatcccgccctgatccgcgaaggtgacgcgctccgggcgaaatccgtagaccacctccctgacaccagcgtttcgcgcaccctccgcgatctcctgcggcagaggcgcgctctgtcccaacggaccgagatcgaccagcagtccacggtcggactccgcgagcgtgcccttgagacgattcatgccgggtgcgccgatgaaatcggcgacgaagaggttgaccgggtcgttgtagacctgaagcggggtgccgacctgctgcagtacgccatgatccatcacggcgatccggtcggccattgtcatcgcttccagctggtcatgcgtgacgtagaccatcgtctgccggaactgccgctgaagatgcttgagctcggttcgcatgacggcgcgaaacgccgcatcgacattcgacaggggctcgtcaagcagaaagatggccggctcgacgatcgccgagcggcctatcgccagccgctgcaggatattcacggagagcttcgcggaaggctgtttcagcaagggggtcaattgcaggaagtcggccatcgccaccacgcgccggttgatttccgccgacgcaacgccgcgcatcttcagcccataagccagattgtcgtagacgctcatatgcgtgaagatcgcgtagttctgaaagacgaagccgacgccacgcctgcccatggcgacgccgttcatgtccttgccgtcgaaaaggatacgcccttccgacgggttttccatgccggcaatcatgttcatcgtcgtcgattttccacagccggacggtccgagcagcgccatgaactcgccgtcgcggacttcgaggtccatggccttcagcgcggtgaacgcgccgaagcgcttgaccagattgtcgaggtgaatggtggtcacgcggcgacctccttcctggcggcattcatccgcccgatggcaaaggcaacgaggatcgagaggacgaagaggatggcaagggcgatggcggcgacatagccccagatgaggtcctgctgcgtgaccttgtatatatagaccgatatggtttcggtcgcgacgcctgggccgccaccggtcatgatgtagagcgtgtcgaagatcttgaaattctcgatgacgcggatcgcgagtgcgatgacgatgatcgtcttcatcttcggcaggacgatcgtgcggaagcgttgcgaccaggaagcgccgagcagggttgcggcgcgcatctgatcctcggggacaccgacgagacccgcgagcaggatgagaaacatcagcggcgtccattgccagatatcggcgatcatcaccgcgatcagtgccgtgccggggctcgaaagccaggcgagcgttatcgtcgttcccgtcaaagccgagagaatattgtttaccggaccgcccgactggaacagcatgaagaacatgtagcccgcaaccgccggcacgaccatcatcgggatcagcatgacggaatagaacagccgctttcccgggaagtcgtcgatgaacaggatggcaagcccaagcccgatcaggaattcggcgggcacgcagatgaccatgatcaacgcggtttttccgagcgcgctccagaagcgactatcgacggcaaggtccgtgtagttggcgaaattgttccacgactgccaggcccgccaccaacccacaccgtcgagcggcgaccagtcggtcatgctgatatagagctgcatcagcagcggaaacagcgcgatgaagagaaccagcacctgcgccggcagcgtcagcagcagccccagtcgacgcgcctcgggggcggcggcggatatctcttccgcaatcacgggcagcttcttttcggttgcgacggcactcattgcttgagagctccgaaggtcaggccgcgaacgagatggcgctgaatggcgatccccatgataacgggcggaacggcggcgatgaggccaagggccgccttggcgccgtagagttgccccgtcatcgaggacgagagcgacgccatgtagacggggatggtgacccattcgcgcgtggtcagaagcagggaaatgagatagtccgaccagttcagaatgaagacgaagagcgctgaactcgcaagcgccggacgcatcatcggcagcgtgatcttgatgaagacgcgcagccgcgtgcagccctcgaccagggcggcatcctcgatctcccgtggcatgtcgtcgaaaaacgtcttcatcagccagaaggcgaagggcagcgtgacgatgccatagatcagtgccaggccccaccagctgtcgatcatgccgaaataggcccacatgatcatgaccgggatcatgacggccatcggcggaaatagccgcagctggatgagcgccagcggcaggttctggcccgaaccgaagcgcgacaggccataggcggccgacgtgccgcatatcatggcgatcagcgttccgaagatcgccgacagcaatgaggccaaaatcggcttggccgccgtgcgatccagcgcgacgatgagatccgtcgtcgaggtgccgaagatgaagcggaaattgtcgagcgtcggttgccgcggccaccatgtcagttccgcaccgctggccgaccactcggcgatcggcttgaacgccatcgacgccatccagacggtcggcacgagcgtgactgcgagagccaagaggatcacgcaatagcggaagatttcaaaagacagcgaacggttcatgtcaaccacgatcgagactgaaagatcggatgtgcgggcctgtccgcccgcacatccagcgtctgctcgtcagctttccagcggatccagcaaggtcggccaggcctgcttgttggtcttgatcgcttcgaccagcttgtcttcaccaatgcggcgggcaatgcgcgtccattgcttttcggtgtcggccatcgcttccttggcggtcttggccttggtaagcgcggccaccagattttcatcgagcgcgctgtggaacgccgtggcaccgggatagttgatggatggaactacgcggctgacggtctcgcgcacgacgtccatgtgataggcgtggtacgtgtcgcggaccagcggatcagcgaaattggccagctgaaagggatcgaaatagccgcccggatttgccgtcatccacgagtagatccggctcgagccgagccattgcagcagcaggtaacagacttccgggctcttgctctgcgacgagatcgacgccgacagattgagccagaggacggaccggcgcaccagatggccgtcgatctcgcggcccggcggcagcatcgagccgatcttgccggtaatcttcgagccttcgttggccttgttgtcgagaaacttcggtaggttcgagaaggcgcaggtcatggccgcgccgccacttgcgaagttgccgtattgctccggccatccccaggagacggcatccggcgaatggtaggacagcgcgtccacatattcctgggttgcctgatagccggcgtcagagttgatcagcggcttgccatcgtcgctgaacaggtactggttcggcgacgccatggacgtgaagcgctgataccagttggtatagccccatccctggtttcgaagatcggtacagccgaagagccccttgtccgggcgatggaagaaggcggcgatttcgtcgagctgcttgaatgtgcgcggcggcgcgagcgcatagccatgcttgtcggcgaaggccttcttctcggtctcgtcgttgaagagatccgttcggtagttccaggtctggaagtcgccgtcgagcgaaacgccgtatgtcgaaccgcgatattggttcagcagcgaaacgcccgccttgccgttgacataacctcgctgcggatcatcccactccggtttgtagctggcgacgaaatcgtccatcttgatgatgccgccggtttcggccagatcgccaagacggttccactcgacagcataaatgtcgaaggcaccgcccttggtggagatgtcctgcatggtcttggtgaattcctgcccgttcggcacaccgacgacatcgagaacgatccctgtttccttttcccagagatccttgatcgaaggcgccccggccgggaacggcttcgtcagctggccaatagagccgtcggacaggccaagaacgatcttggcgggagccttgcctgcacccttcagcgccttgacgccctcgatcgcacgcccttccggcgtgtctgcgccatactggtaccgctcggcgccggcaaagccggtcggcccgccaatcatgccgggggcgagcccgtctgctgcgaacgcgcggccaggacggataaattgcggggcaattcccgcggcggcggtcaacgcgaagacgcgaccagtcgtgctcaacaggtcgcgccgcgacatgcgcatagaatctgacatttgatgttcctcccggtcggcggttcctcctcctccgactttgatgattattgacgcgtcaaagatttgatgtcaacatcatttccaatcatattgaattggcgactccgaggccttgcggttttgcagtgcaatagcgcagagagcaggtcgccaaagctaaatgcagtcaggtcttcgatgatttttacccagataaggaacatcaaatccaatcatttgtgccgcgcgggacacccggtaagatgactggaaccattatcatcgcgggagcaggattgtgcggcgctcgcgccgccttctcccttagagagcggggctatgagggacgcatagtgctgatcggcagggagcgccacgcgccatacgatcggccacctctctccaagcaaacgatcgacggtttgcaatccatccagcacatcgccgaagacgagaactacaggaccagccggatcgagcacatgggcggcgtcgacgtcatcgccatcgatcgtcatcgacgggcggtcagcctgagcgatggccgcactctgccctatgacaagctgctgctggcgaccggtgcgcgtccgcgcgtgcttcccggcgccgagagcctgacaaacgtgctgacgctgcgctcgttcgacgatgccatgaaaatccgcgaccgcatcggggtgaaccgcagtctggcgataatcggcggcggcttcatcgggcttgagcttgccgcgacggcgcggcagctcgggacgtcggtgaccgtcatcgagagcctgccgcgtttgatggcgcgcgcggtgcctgccgagatcgcatcgatcgtccaggcccgccatcaacaggaaggcgtcgaagtgctcctgaacgcgagcatcgcgtcgcttgggcaagacgacgaccgtgtccgtattcgcctgaccgacggcaaggagatcgatgccgacctcgcggttgtcggcatcggagccatccccaatacggagcttgcggaggcggcggaactagcagtcgataacgggattgccgtggatgccttcatgcggacgtctgatgcgaacattttcgccgcgggcgattgctgctccttccccctccaggcttatgacggcagccggctccgtcttgaatcctggcgctgcgcgcaggatcaagggatcacggcggcggcgaacatgatggaaatcgcaaccgagtatgatggcatcccctggttctggtcggatcaatacgatctcacgctgcagatcgccgggctgcccagccatgccacggaaacggtgcggcgcgagcttcccgacggttccctcctgctgttccatctcgacgcgcgagggcgcctgatggcggcgagcggtatcggtcggggtaatgcgatcggacgcgagatccgcctttgtgaaatgctcatttccgcgaaggcccatcccaggcgtgaggatctcgcctcgccgtccacccggttgaaatcgctgctggcggcgtgaacgcactcccgattgtctatctaagccgccgcgcgacgctccggtgccttgcgctctgcaatcctcattgtttcaagaaagccaccagaccatgaagagctatgtactgacggtatcgtgcaaatcgacacgcggcattgtcgcggcgatcgccaactatctggccgatcagggctgcaacatcacggattcgtcccagttcgacgacctcggcaccggaaaattcttcatgcgcatcagcttcatctcggagcaaggggtgagccagaacacgctgatcgacgacttccagcccgtggccacgaaattcggccttcaagccagcctgcacgatgccgaaaagcgcatgaaggtgctgttgatggtttcgcgtttcggccattgtctgaacgacctgctctatcgctggaagatcggcgcgctgccgatcgacatcgtcggcgtcgtctccaaccacttcgattaccagaaggtcgtcgtcaatcacgacatccccttccaccacatcaaggtgacgaaggaaaacaagccgcaggccgaagcccaattgctcgacctgatcgaccagagcgagacggaacttgtcgtgctggcacgctacatgcaggtgctctcggatgccatgtgcaggaagatgtccggccgcatcatcaacatacaccattcgtttcttcccagcttcaagggcgcgaacccctacaagcaggcctatgagcgcggcgtgaagctgatcggcgccaccgcgcactatgtcaccgccgatctcgacgaaggaccgatcatcgagcaggacgtcgcccgcatcacgcacgcgcagtcggccgaggactacgtctcgatcggccgcgacgtcgaaagccaggtgctcgcgcgcgccattcacgcccacatccaccaccgcgccttcatcaacggcaaccggacgattgtcttccctgccagtcccggctccttcgcctcggagcggatggggtaatctctcgcgtgatgcggctggcctcgccgtctcggcggctgttcgggtaccggcagccgagtgcgccgatcttcggtcttaaccacggctcccgaaagcctgaagatcttcacggtctcatcaggttttcgtcaggcagggaggttaacagacgcgaaacgtcaacagcgagaacataaatgtcagaattcatatcctatcttttcatgctgctggttgtcgctccgcttcaatccgcgatcaccgacaacctgaaggaggctggagcgcaggcggaggtgatacaggtcgggcaagcgtgccttaacgccgccgtcccgcagctcgtgaagcaagcgcagggcgattacgtatgggcagcatccaccgcggctggcgtcatgttcggctacattcctccgacgaacctgctgacgggaaagagccctgaatgcgaccgtctcgtatcgctgctcggcgacaaaggcggcagcggcgagaaaatagaatcgcaatccgcgcccgaagcaagcgacgtgtagtctgcatacccgggactggcgggcgggcagataactttgccgtgaaccccgatgcggtcagttcatcgtcagctgttcaaattaggtttcttacatacaaaccaaggaacccccatggacaggacaaaacctcgcttttcgagcaacaagggctatctcggacaattgtcggcatatcttccccgtcgcgacaatgccttcgcggcggagcaatgcggaacgatttgtcaccggatctcgagaagcggcgcggtcgagatcctgctagtttcctcacgtgaaacgggccgctggatcatcccgaaaggatggatgaaactcgacagggcgccctacgagcaagccgccgcggaagcatggcaggaagcgggcgtcataggtctggttgaaaggcgccccttcggatatttttcctatctcaagcagtgggcggacggcacacgttcgccgaccatcgtctcggtgtttcttttgctgatggagcgtcttgtcaacggcttcagggaagagagcgaacgcagacgagagtgggtttccacgacggaagcagcaaggcgggttcaggaacccgaactgagaacgctgattctgaaggccggccaggcaatcgcctccggccgcgccggctgaggtggaatcactacgcaaattctctgctgttccggccgatagtcctgcagacgcgaagcgtggggccgcgttcccgcgacatgaatttggtgcgcgcttcgcccccccggatcgcgcgatcatctgaacgcctggatgtggacccggcttagggacaaattggcgcagtcttagaatgcggcttttgttttgggtggagctttgctaatcgtgcgtcgattttacgtcctctgctgacctaaacctatgacaagcaacgttttcgccggttggaagaccgcaactgttctgacgatgatcttgattcagatcgtctacggaagcctgtgcgcgattccgctggcggaccggactttcgttccgtcgagcgttgccgtcaccgcgcaggagcgcagctccaccgcggaaaacaaggcgctgctggcgttcgatgccgacgatcacgttcgatgcgagcagcggtgtccgcgggtcgaactggacaaagtcgtattatcggagggattgccgtcttccgcgtcggcagccttcccgcgcgaaaaccggatctatttgatctcgcgcccccccaaacagctggtctaagcaatccattcggccttgccggggcgtttcgccccgagttggctcgatcatggattggacacgactgagcagactcttcgaccagacccctggcgaagcgtgtgcgatgcgcaccgggatctcgtgagagctgccggattcatcctgaaattacaatgtccttattgcgggagtcgaaagtgcctctgtcgaagaagctcttttgcctcgctgtcgttacctcactgcccctcctcagcgggtgcaagatggtggtgatgtcgccctccggcgatatcgcgcgtcagcaggcgaaccttatcatcgtttcaaccgtgctgatgctgctcatcatcgtgccggtcctgtttctcacgttgtatttcgcctggcactatcgccaatccaacaagaaggcgaagtacgatccgacatggcaccactccaccaggctcgaaatcgtgatctggtcggctcccctggcgatcatcatcgcgctcggcgcgatcacctggatcagcacgcacaagctcgatccatatcgaccgcttgaccgcatcgatgccgcccggcctgtcacggccgacaccaagtcgatcgcggtggaggtcgtcgcactcgattggaaatggctgttcttctatccggaatacggcatcgccaccgtcaacgaactcgcggcgcctgtcgattcgcagatcaaattcaaactgacggcctcatcggtgatgaacgccttctatgtgcccgcgctcgccgggatgatctacaccatgcccggaatgcagaccaagctccatgccgtcatcaacgaggccggcacctacgagggcttgtccgcgaactacagcggtgaaggtttctcccagatgcggttcaagtttctgggactggagcaaggcgatttcgaccagtgggtcgcaaacgtcaagcgcaacggcacggcgctcaatcgcgacagctacctgaagctcgaaaagccgagcaaagccgaacccgtgcgctattacgcgacggtccaggacggtctctaccgctcgatcctcaacatgtgcacccgcgaaggccagatgtgcatggaagagatgatgatgatcgacaagatgggcggggcgggcaaggagagccaggaaaaccgggagcgcctggagtttcaaatgccagaggcggaggaagcaggcgcggagggcaatggcccgcttggcgcggccatccctgtcgccgatcccaagcccgcaatgccgtccatgccgggtatgtcaggcatgtcagggatgtcgggcatgtcgatggaccacaacatgcagaacatgcaggaccccgcgagatctggaagcgacgggaacgggcaggaacctagtccgcccgacaacggcgcttccgcgaaaccctgaaggattcggtagataagaatgttcgaaaatctcacactcgcccagctcgtcttcggacgactcacctgggacgccattccatacgatcccatcgtgcgcagcaccttcgtcgtggttgcgctcggcggcatcgcgctcgtcagcttgctgacctactacaagctctggggctatctctggaaagaatggttcaccagtgtcgatcacaagaagatcggcatcatgtatatcgttcttgcgctcgtcatgctcctgcgcggcttcgcggatgcgatcatgatgcgtatccagcaggccatcgcgttcaatggaaatgagggctatctgaagcccgatcactacgatcaggtcttcacggcgcatggcgtgatcatgatcttcttcgtggcaatgcctttcatcaccgggttcatgaactatatcgtgccgctccagatcggcgcgcgcgacgtgtcgttcccgttcctgaacaatttctcgttctggatgacgacggcaggcgcgatcatcgttatgatctcattgttcgtcggcgagttcgccaagacgggctggctggcctatcctccgctttccggctctgattacagcccgggtgtcggtgtcgactattatatctggggcctccaggtcgctggtgtgggaacgacgctatcgggcatcaacctcgtcgcaaccatcgtcaagatgcgtgctccaggcatgggcttcatgaagatgcccgtgttcacctggacctcgctctgcaccaacatcctgatcgttgcgaccttcccgatcctgaccgcaacgctggcgctcctgtccgccgaccgctacctggacaccaacttcttcacgaacgatctcggcggcaatccgatgatgtacgtgaatctgatctggatgtggggacacccggaagtttacatcctgatccttccggctttcggcatcttttccgaagtcgcgtcgacgttctcgggcaagcgcctgttcggttatgcctcgatggtgtacgcgacctgcgcgatcatgatcatgtcctacctcgtctggctgcaccacttcttcacgatgggcgctggggcttccgtcaacgccttcttcggcatcgcgaccatgatcatctccattccgacaggagcgaagatgttcaactggctgtttacgatgtatcgcggccgaatccgctacgaactgccgatgtactggctgatcggcttcatggtgaccttcgtcatcggtggcatgaccggtgtcatgctggccattccgccagccgacttcgtactgcataactcgctgttcctgatcgcccacttccacaacgtcatcatcggcggcgtgctgttcggcctgatggcaggggtggcgtactggtggccgaaggcgttcggcttcaagctcgacatgttctggggcaagatgaccttctggttctggcagatcggcttcttcttcgccttcatgccgctctatgtgctcggcctgatgggcgttacccgccgtacatcgcagttcgatgacccgtcgctgcagatctggttcatcatcgccgcattcggcgcggtcctgatcgctctcggcatcgtatccttcatcatccagatggccgtcagcatcatgcggcgcgaccagctgcgttgctcgacgggcgacccgtggggtggccgcacgctggaatgggcgacctcctcgccgccgccggaatacaacttcgcgtccacgcctgtcgtgcacgagttggatgcctggagcgacatgaaggacaacggctacgagcgtccgaccaccggcttccggccgatccacatgccgaagaatacgggcacgggcgtgatcctgtcggcaatcagcatcgcgctctctttcgcgttgatctggtacatctggtggctggcgctggtgtctttcgtggccatcatcgtcgtctcgatcgcccataccttcaactacaaccgcgacttctacatcccggcggaaaaagtcaccgaggtcgaagacgcacgtacaaagctgcttgccgagaggacctgacatggcaaaccctatcgaagccgtcccggcgaaaaagcagttccatctcgaggaggagcatcatcccgaggggagcacgaacctcgggttctggctctacctgatgagcgactgcctgattttcgcggctctcttcgccacttatgcagtgctcggcggcaactatgccgccggccccgcgcccgccgatcttttcgatctcaggttcatcgcccttgcgacgctgatcctgctcgtgtcgtcgatcacctacggcgtcgcgatgatccgcgccgagcgcaatgacaaggctggcacgctgttgtggctcggcatcaccggcctgctcggtctcgcattcctcggtctcgaagtcttcgagttctccaccctgatcgccgaaggagccggcccgcagcgatccgccttcctgtccgcgtttttcgcgctggtgggcacgcacggtctgcacgttaccttcgggatcgtctggctcgtcgtgctcatggtgcaggtgtggaagttcggcctcacgccggagaaccatcgacggctgatgtgcctgtcgatgttctggcacttcctcgatctgatctggatcggtgtcttctccgtggtttatcttatgggagttgtcgtatgacttcgaaatccactcacgatcacgccagtcaccaagcgggtcacgcttccttgaagggttaccttaccggcttcgttctctcgttgatcttgaccgccattccgttctggctggtgatgggcaacgtcctcgagagcaagccgctgacgatcgcgttgatcatgatctttggcggcatccagatggtcgtccacatgatctacttcctccacatgaacagccgttcggaagggggctggacgatgatggcgctgatcttcacgatcgtgatcctcgtgatcgttctcgtcggatctctctgggtcatgtaccaccttaacgccaacatgatgccgatgtcgccggagatgatgaagaacatgccatgaggcggttcgttccaacccctctcaagcgcttctgacgctcatcctcatgcgcgggatcggtccgcccttcccgcgcatgagaccataatcctgagacccggaagggtcgatcacgggcctgagtggtgggatctcgctctctccggcttatgttacttcgcgagcaaatgcccttctttctcgtcacccatcgatcacttgttgaagccgatgacgttgagcacgccgcccgcaaggcgatcgctaaaatcgagagcggcggcaggttcgaagtggaggttaagtccgacgtggcgaccatcgcaaccgtcgtcatagacagggatcggacggagacgacgtccgcaacgggaaaatccgcgcccgggccggaggcaacacccgatcctgatgttcccgcggcgaaacctggtcaggctgctatcgaaaaagccgtgcgagccaatattccgcaacgcccagacaggcgaaccgccgcgatcgtgcaggtcttccttgccggacttacgctggcctctctctgtctcgcattgctttgactgtcgaaggcaacggtagaggccggctctcacgagccatcggcgcgccgccacaccacgccaatgctggatggcttttttagcctcacaaaacgcggctattcatcgcgattgcgtcagacccaatattccagccgaaacacagcctgcaacgaactccttgagatcgggtcgcgtaacatagtgctcccccagccaaggaggaactcgtgcgaaatgaagcggcaaaccggtgttacctgatgtcttcgaaatctcaacgatgcttaggcccgaccggccgaaaacacgagatcgcccgtcgcccctgatcttgcggctatcgtggtttggtcagctttagccagaaataggcatagggctggaatgtcagcgggtagctgtcccggccgatagcgggaaacgatgcgccacccgacagctcaaccggcaccaaaccttcgaggtcgggaagggaaagcttcaccgccagcgacgtgtcggagagattggcggcgcacaggatcacatcgtccccgcatgtcctgagataggcgatcacgctgtcgttgtcggtcttgacgaaccgcatattgccgcgcccgaaggcgcggtgctctcggcgcaacgtcagcatctgccgggtccagttcaagaacgaatgcggatcgtcatcctgctcggcgacgttgatcgcggcgtagctgaattgcggatccttgatgacgggcaaagccagcttgtggggcgccgcattcgaaaagcccgcattctcggcactcgaccactgcatcggcgtccgcaccccgtcacgatcgccgagatcgatattgtcgcccataccgatctcgtcaccgtaataaagaaccggacttccgggcagcgacaacagcagcatgtgcagcagctcgatcttccgtcggtcctgatccatcaacggcgacagccggcggcggatgccgaggtttagccgcgcgcttgtcggcggcataggtgtcccagagaaaattgcgttccgcctccgtcaccatctccagcgtcagttcatcgtggttgcgaaggaagatcgcccattggcattcgtcaggtatggaactcgtctgcctcaggatcgtcttgatcggtctggcgctttgcttcgccagcgccatgaacatgtgcggcatgagcggaaagtgaaacgccatatggcattcgtcgccgtcgccaaaatattcgcgcgcttcttcctgccagagattggcctcggcgagcaggatcacatttggatgcttctcctcaagcttcgcacggatgtgtttcaggagggcatgggtttcggggagattctcgttgtcggtatgctcacgctcgacaaggtggggaatggcatcgagccggaaaccgtccacacccttctccagccagaaattcatggtagaaagcagttcctcgaccaccgcgggattccgatagttcaaatccggctggtgggaatagaagcggtgccagtagtaagctttggcgacgggatcccagctccagttcgatttctccgtatcgatgaatatgatgcgcgtttcctcgaatttgtcatccgtatccgaccagacgtaataatctcgctcgggcgagcctgccggagcgcgacgggcgcgctgaaaccatggatgctcatcggaggtatggttgaccacaagctcgacgatgacgcgaatctgtcggacatgcgcctcatcgatgaaggcctggaagtcctcgatcgagccatactcggcgctgacagcacgataatccgagatatcatatccatcgtcacggcgtggagatgggtagaatggcaatagccagatcgtgttgaccccgagtgaagagatataatcaagcttgcgtgtcagcccgtttagatcgcccacgccgtctccattggcatcgaagaagctcttgatgtggagctggtagatgaccgcatccttgtaccacagcgggtcgccgctcaattggtggtctcgcaccggcctctcgtatcggttcattgggcggtcacccgccagaccgtgttgccgacgtcatcggcgagaagcgctccgataaagcaggcagcggcgaaatgcagggggatggagcggaaggaagatttgaaagcccgcaagggctgggagacggcatgggtcatggccattgtccaaagagactggaaactcgatggtgaactggcaatcgcgctgattgttcccaccacggccgtattcaccgacacttgtcccgtctggcgtcgtcgttgatccacggtgtgcggcacggagtctggaggaaaggttcgaacgctcgtgcgtgcgaggcgatctatgtgtttcgcgaacgcagccacggaagctgtgccacctgaaatggcccgatcgccgagttactttgactgtaaaaagccgtagccatatccatcgcttgcagacagtcttccgcgataaccagcacgcagcgcctcctattgccgccaagcgcggcaatatgccttccggttaggcgcgttgggcttttcgtccgaataaagcacgcgttcgacaagggtctgtggcttggaaagcgggccattccagaaatgcttgaggaaacgttggctcgcctactcgccccgaaccgaacaaccttcgaggtaaattaagacccccgccccgccacagccatacccgaccaccggcacatgggaactctgctgttaggcgccttcctcgccatgttgcggccgctcgatttccttgccttcctgcttgaagctggtcatgacccgcaatgtggcgaaggtggcgatggacagtacgatcgctgtctcgtaattgcccaagccaaccgctaccccgatggcgcctgtcgcccagaggctcgcggccgttgccgtgccgcggatgcttgccttgccgacgagtatggccccgccgccgataaagccgacgccattgataaggccctcgataatccttgctgtggcctcggcactgccgcgcgtgacattttcggcagcgaggatgaaaccgcaggccgcgattgccacgatcggaaaggtgcgcagacccgcgctccgttcgtttcgctcgcgatcccatccgatcggaagggccaagacataggcgatgatcagtgtggcaagacccttgaggaactccagatctattccgacgacattcagccattccatcaaacgaccggtctcctgttgctttgctgacggaaggagatggaagtctcgaaaagactgacaagatcacttggcatggatttcgcgggcgccatgcagcaccgagcttctcttcctcgatcgatagccgcgtgagcggcattccaccccgtgtcgcggcgatcgcgaggggagcacaatggtgagccgcttgtctcggaggagagcgatccctgctccgcccccattgacaacgtgcttatgccataagttcctcgatcacgagcaggatcagaaagcccgcgaagaacatcgccgtcacccacgggcggtcaggtgtctcgtgcgcatcgaccagcaattcctccgtgaccagataaagaagggaaatcaggccgaaagcgagaaatcccgtcatcaccggtcccggcaacatcgcgacgggcgccgccagaagcgctcccgccggcaggagcagcaggagcacggcgatcgtcgtgacaatccgcagacgggatttcaccgtttcagccatttccgtcgcaaccgtcagcccgagaaagagcacctccagcgtcaaggcgatcgtcagcagcagccctgttcgcgcaccggccgcaaagccgatgccgagcaccagtccatcgacgaggatgtcgatcgcgaccgccaccagcagtccggtggagcccttgagaaagccctccatctgcttgaccatcagcatggcgacgacgccggccacgccgccaatcgccgtcgcccagacagacccgccgtgcaccacatcgggaagaatctcgccggccgcggcggcgaacaccacaccggcggcgaaatgctgaatggcgctgatggctatcgggctcggacgtgcgaacaacgcgacaatggcacctgccaaagcggcaaaggcgggaatcaaggtgtaggttagaaccatcatgcgtcttccaatccccggatatggaccttccgaagaaggtctgtcggatgacctaagtcaaaggatgagcaaggcaatggtggccacccgcctcgatagcgggacgcaccacgaccaccatcaaaagcaacagtaaaatccattgattgcgacgcctcggcaaagggctgcacatgtcattggcgtttaacagcgccgtaagcatcgagccactcgaaaacgtaccgcgtgccgtcgcttcgtcaagtcgcgcaggtgctcgccaaccgagttgatgatattcgaccgttccacacgcctctacctgtaattgctgacctacgaacaggcgagaagcactgtcatcgccgagctttacccccgcttgcaataagttggatactaatatactacttctttccaagccattgggaggtggcgtcaggtggagaaaaccctcgggcaaatgattgctgacatgttgtgtgccgcgcgatgagcgaagcccgcaagagacgctcgctcgccggtgtcacccacctctcgcatcagagagcggccgccccgcgcgcggcgacgctcgtctacaacacgctgcgcgatgacatcatttccttgcgccgaaggccgatggacctcctcaacgagaaggagctggaggcgcatttcggcgtcagtcggacgcccatccgcgaggcgatcctgcgcctttccgacgatggtctcgtcaatgtctttccgcagtccggcaccttcgtttcacgcattccgcgtcacgcgctgtatgaggcgatactggtgcgcaaggcgctggaggatacgacggtgtcgatcgccgtcgagaagatcaccccggcgggcattcgttcgctcgagcgtaatctggccgatctcagcgcctgcttgcgcgacgacgatgtcgcgaccttccatgtcgtcgacaacgattttcacaagctgatcagcgatatctccggctttcccggcatctgggcgatcatccagcaggtgaaggtccattccgatcgctaccgcctgctgaccctgccgcaggaggggcgtcttgcccgcgtcatcgaggagcactcggcggtgatcgagtgcatgaagacgggcgacaaggccggggccgcggccgccatgggtttccatctcggcaggttgctcggcgaagtcgagaaggccgaaatatgggatccgaactatttcatcgaggatgcaaaatctcccttggcatccattgaagagaagggaaaaagtcaatgaagatcgacgtccgtcacgcttcccatccggaagccgttcggggctacgacacggaaacgctgcgccgccattttctgatcgagacggtgtttgcaggcggcgaaatccggctcacctattcccactatgaccgcatggtcattggcggcgcgatgccgctcggcgaaggcctttcgctcggagcgccgaaggaaatcggacaggagaccttcctggccgaacgcgagcttggcgcgctgaatatcggcggcgccggccgtgtcgtcgtcgatggtagcatccatgagcttcagaaatacgattgcctctatatcggcaagggcgccagggatgtccgtttcgaaagcactgacgctgccgaccccgcgaagttctatctggtctcgacgccggcgcatgaggcgcatccgaccgtgcttctgacgcgcgacaaggcgcgccatctgacgcccggcgaagcggcgactgccaacaggcgctccatctaccagttcatccatcccgaagtctgccagtcctgccagttgaccatgggcttcacgatgatcgacgccggcagcgtctggaacaccatgccggcccatacgcatgaccggcgcatggaagcctatctctatttcgacctggaagccgatcagcgcgtcttccatttcatgggcgagccgcagcaaacccgccacatgctggttgccagcgaacaggcgatcatctcgccgccctggtcgatacactcgggcgccggcaccaagaattacagcttcatctgggcgatggccggtgacaacaagagcttcaccgacatggaccatatcgccatcgcggatctgaggtaggacgatggccaatccgttcgatctctcggggcgcaccgccatcgttaccggcgccaataccggcatcggtcagggcatcgctgtcgcgctcgccgaggctggtgcctcgattgctgccgtcggccgctcgtcgatggaggagaccagagagctggtcgccaggacgggcgtgcgcttccacgcgatcagggccgatcttggttcgatcgctccggtcaaggatatcgttgccgagaccctctcggtcttcggctctctcgatatcctggtcaacaatgccggtatcatccgtcgtgccgatgcgatcgacttcaccgaggaagattgggacgccgtcatcgataccaatctgaagacggcctttttcctatcgcaggcggctggcaggcacatgctggaaaagggcagcggcaagatcgtcaacatcgcctcgctcctgtctttccagggcggcatccgtattccgtcctatacggcgtcgaagagcgggcttgccgggatcacccggctgcttgcctgcgagtgggccggcaagggcgtcaacgtcaacgcgatcgcgcccggatatttctcgaccaacaacacgacggcgctgcgcgaagacccggatcgcaacgccgcgatcctggcgcgcattccggccgggcgctggggcacgccatcggaactcggcggtgccgccgtgttcctggcatcggcagcatccgactacgtccacggtaccgtcatccccgtcgatggcggctggctcgcacgataaggcattggcgtcggcgtgatccgccgcgcacggaggagttatgcagtatcagttcgatttcggggcgctcttgccctactggcaggatttcctgtccggcgcactgacgacgatcgagatcaccctgttctcggtgatcatcggcatgggcatcggcgtggcctgcgccattgcccgccgctcgaactccgccatcctgtgcggcatggtcagcgtctatatcgaaacggtgcgcaacacgcctttcatcgtacagatcttcttcatcttcttcggcctctcgtcgatcggctttcgcctgccgatcatcgccgcgtcggtctttgcgatggtcatcaatgtcggcgcctatacggccgagatcgtgcgtgccggcatggattcgatccatccgagccagatcgaggcggcagaggcgctcggtctgtcgaaattccagatctaccgcgacatcatccttctgccggcgatcgagcgcgtctatccctcgctctccagccagttcatcctgatgatgctgtcgacgtcgatctgctcgcagatttcggccgaagagctgacgggtattgccaacaacatccagtcgaacaccttccgttcgctcgaaacctatttcgtcgtcgcgctcctctatatcgcgatcacctatctgatgcgcgccgccttcttcgggcttggcctcgttgcattcccgcgccgtcgccggctcgggctcggcgtgtgaggtgacgatgctcggcgcgttttcgaccaatcatctcttctacctgctcaacggcctgctctggaccgtcgtgctctcggcgctggccttcgtgctcggcggcattgcgggcttcttcgtcatgcttgcgcgcatctcgcgcttccgctggctgcggcgcacggcgctcgtctacatccagatcgtccagggcacgccgctgctgatccagatgttcctgctctatttcggcctcggcgtcttcggcatctcggttccgccgctcgtcgccgccggcctcggcatgatggtctattcgagctcctatctcggcgaaatctggcgcggcgcggtggaatcgatcgccaagacgcagttcgaggcggccgaatgcctgggcctcacccgctggcaggcattgcgcgacgtcatactaccgcaggcgctgaagatcgccacgccgccgacggtcgggtttctcgtccagctcgtcaagaatacctccctcgcatccgtggtcggcttcctggagctgacgcgcgcggcgcaggtcatcaacaactccctgttccagccgttcctggtcttcggcgtcgcagcgctcttctatttctgtgtctgctatccgctgtcggtctggagccgttcgcttgagaggaaactcaatgccggccgccgttaaactcaccaatgtcgtcaagcgtttcggcgccctcgaggtgctgaagggtgtgtccttcgagatcaataccggcgaggtcgtggcgctgatcggccagtccggttccggcaagagcacggcgctgcgctgcatcaaccgcctggagacgatccaggacggcacgatcgaggtctgcggccaccgcgtcgaggatccgaagctcgatctgcgcgcgctgcgccgcgatatcggcatggtattccagagctacaatctcttcccgcacatgaccgtcgccgaaaacatcatgctggcgctgcgccgcgtgaaaaacatgcgcaaggaccaagcgcatgagattgccaggcaggtcctcgccaaggtcggcctgtcggagaagatcgacaactatccggaacagctctccggtggccagcagcagcgcgtggcgatcgcccgttctctagccatgcagccgaaggtgatgctgttcgacgaggtgacctcggcgctcgatccgaaactgaccggcgaagttctgcgcgtcatggaagatctcgcccgcggcggcatgacgatgatcgttgtcacccacgagatgggcttcgccaagcgggccgccaatcgcgtcatctacatgcataccggcaaggtctgggagaccggaggggctgacatcctctccaatccgcggacgccggaactgaaggagttcatggccgaagagctgtgagctcaggaggaggacctgcgcgaaaccgcagggtcgggtaaacgagagaggagactcatatgccgacgaaaatgatttcgaaactggcgctcatcgccggcgcgggcctgctggcctttgcatcggtcgccaatgccgacgtgcttgaaaacatcaagaaggccgggaaggtccgcatcgccgtggcgatgggcattccggaatattccttcgtcgatgaaaacctgaagccgaccggctcggatgtcgaaaccgccaggctgatcgccaaggatctcggcgtcgaactggagttggtggaaatcaccaacgccgcccgcgttccctcggttcagaccggcaaggccgacatggtcgtctcgtcgcttggcatcaccgaagagcgcaagaaggcgatcgactactccgttccttacgcgacgctcgctctcgtcgttgccggtccgggtgacgtcgcgatcaaggactatgccgatcttgacggcaagcgcatcggcgtgacgcgcgccacaaccaacgaccaggacatcaccgccaaggccaagggtgcagatatcgtccgcttcgaggatgatgcgacgcttatcacctcggttgtctcgggccaggtcgacatcctctccagccagtcggccgtcatcaacggcatcaacaagaagatgaccgccaatccgctgcaggtgaagttcacccagaaggaaaccaatctcggcatcggtatcccgaagggcgagacggctctgaagggctggctcgacgggtgggtcaagaccaatttcgaaaacaaggtgctgcgcgacatctaccgcaagtaccacaacgccgaattgcccgacgacctgacctcccgccagtgatggaagcaatagcgctggggccgaaaggccccggcgaattttcgggatgtgaggtcatcagcgcgctcggcgccaacgccgacagtctgtacgatttgcttatgtcatgttgctcctgctaggaccgagccggcgggcgttagactgacagctcaagcatttgaaatgacatactttcgagcgtgcctcgaacttgtcgaccacgagtgacgcaagtccaaatgcttcgacgggcaaagagtaaagttccgcgtcctccgtcttcgaaacatgcgccgcgcgtctcagccttaaactccaattcaaaatcagtaccgcaccttcggacgcttcccgaggggggcggcgtcgcacaactcgtcgccccacgaagcgtgcatttgcgcctgcgggataataccagtatacatccagttgatttttcttgagttctccttcggcggatttcccatgacagacaatcaggtcatcgatgcaatcgggaagtctcttgaccggcttccagccgatatcccgcgctacaagcgattgaagctggcaatcgaggaggcgatccagacacaggcctttcaatccggcagcgtcctgcctggcgagagggtgattgccgcgactttttcgctctcccgcgtaaccgtgcgcaaagctttggcactgcttgacgaggagggcctgctgaaccgccgccatggcttcaaaacggaaatcggctcgcgcgtcgagaaatctctttccacgctcaccagcttctccgaggatatccgcgcccgaggccagatgcctggatgtatctggatatcaaagcagataacccgcgcgtcttcgaccgagatgatggcactcggaattgcgggaaatgccaatgtgatcaggatgaagcggattcgaaccgcgaacggcctgccgatagcactggagacatcgatcgtccccgtccgcttcgtgccctcacccgacctgattggccagtcgctctacgaggtgctggaatcccgcggcttcatgccggaacgggcgatccagcgcatgcgctcgcgagcggcgaccgccgaagatgccgaccaccttcactgcgaggcaggctcaccgctgctggtgaccgagcgccgttgttacctggcggatggccagaccgtcgagctgtgcgaaacccgctacaagggcgaggtttacgacttcgtcttcgaactgcagcgatgataccagtcattaactggttgctatctggtattttctatctatcgtgatctccgaaatggagcatcccgtgaagcctgaagacatcaaaagcagcctcatcgtttcctgccagccggtgcccgacggcccgatggacgatgcgcgcttcgtcatcggctttgccaatgccgcagcggccgctggcgcaagagccgtccgcattgaatccgtcgactacgtgaaagccgcccggccgcatgtgacagtgccgatcatcggcatcgtcaagcgcgatctcgacgacagccctgtgcgcattacgccctttatcgctgatgtcgaggcgctggcggatgcgggcgccgacatcatcgcctttgacgcgaccgatcgcattcgccctgcacctgtcgaagcgctggtgtctgcggcaagagccaggggcaagctgaccatggcggattgctcctcgctcgacgatgccaagcgcgcactggccgccggtgtcgatttcgtcggcacaacgctgtcaggctatgtcggcgggcccgaaccggtcgaacccgatatcgcgttgatttctgcgatgcgcgcgctgacgccttatgtgatcgccgagggccgcattcgcacaccggagcaggcggcgcgtgcagccgatgccggcgcgctcgcggtcgtcgtcggctccgccatcacccgcacggaacattcgacggcctggtttcgcgaggcgatcgaggcggcgttctcggcgcgcggggccgcggccaagccggtcctcgcgatcgatatcggcgggaccaagacaatgatcgccctcgtcgaccacgacaaagtgctggaggaacgcgtcgtgggcacgcggcgcgcggacggtcctgacgcctggctggacgcaatcgccgccgagaccgccgggtggaccggccacttcgtccgcgctggtatagccgtgaccggcttcgtcgaagccggcagctggtcggcgctcaatccggcaacccttgggattccagacaactatccgctggtgacgcacgcaagggaccgtctcggggtgcccgtcacagcgatcaacgacgcgcaagcagcagcctggggcgaatacaggttcggcgccggacgcggcgaggatatcgtcttcctgacgatctcgaccgggatcggcggcggcatcgtcatcaatggcaggctcgcctccggcctcgccggtcatttcggcctgatccgcggtccgtcgcaggacgcggaaccgctggaagacatgacatccggcctctggatcgccgcacaggcgaaagcggccggccatcacgctgacgcggtgaccgtgtttgccgaggctgcgaacggcgcgatctgggcgaaggcgatcgtcgagcggtccgccgggcgcgttgccctgctttgccgtgatatcaagctgatgctcgatccgaagcggatcgtcatcggcggcggcatcggcctcgctcctggctatctcgatcaggtgcggtcacagcttggtggcttgaattcacgcatcactcccgacctcgtcgcggcggaactcggcagtcgcgcgggcatcgtcggcgccgcggatctggcgcgcaccaaagcatgaagagacgacttctgcgacaagctgcaggccgatatggcgccggttcgacggcaagcaatatggcgttccgaccgatctttccctgcacttcatcttcggcttcatcaccgcctggaatgagttcctgttcgggctgatgttgacgaccaacaaggcggtgccgatgaccgtcggcgcatcgttcttcttcgccgccagcggtggcggcgtgcaatggggggtggcgtcggcagtcatgacacttggtgcactgcctcccgccctgcttgggctgttgatgtaccgacagatctcgggttcgatgacatcgggtgccgtcaagggctgacgccgcccgatgctcggtaaagcgtcggctgcaacagcggtttcgatcctggccaccttctatcgccggcgtgagcggccatgcccttttgcatacgccttggccacttgccaatcgccaacatccaccatcacgggcgccgtcccggcgatccggtccgcggccgcaatcctctgagttctgccaatggctgtcgcgccctcttcggatcgcgatgagcgacggaaactcatccagttgacagatatcctacaagtggatatctacttattgaccctgatagaaagccggaagaagcatggcccttaagtcgatcaaacctttgacacgcgctcccctgcttcacgtttccgtgcaggaaagcctgcgggcatacatagacgacaacgggctcgagccgggcacgatgatgccgccggagtcggagcttgcgacgcagctcggggtcagccgcaattcgttgcgcgaaggcatcaaggccttggaatcggtcggcgtgctggaatcgcgacgtggcatcgggatcttcgtgaaggcgttctcgttcgagccgctgctcgacaacctggcctatggcctcggcggcgcgcttcgacagatcgaggaagtcatcgagatccgtcggacgctcgaagtcgggctgatcggcaagacgctcgagatgatcggcgatgaagacattttggaattgcgggcaactgtaaatcggatgggcgaacatgctcggcgcggcgaatctttcgctgctgacgaccagcagttccatacgctgctgttccggtgccagaacaacgagatgctggcccgcctgctcgatgtgttctggcttgccttctacaaggcatccgatttcgtaaatctcgcaaatatcgaccccctttcaacctggaaggatcatgccgcgatcgtcgaggcgatcgaagccaaggacgtggcggaagcgcagcggcgcatggaccgtcactacgaaggcatcttgcaggttatcgccgccaacaagacgaattcaaatgtgggaggaacacgatgaatcgactggcaagactatcatccgccattacgctcgccgcgatgatggcaacgaccgccgttccggtcttcgttgccgctcgggcgcaggcggcgaccttgtcggggggcttcgacgtcggccccggcggcttccagggcaatttcaatccactcgcggcgacaagcggcttcacctggctcagcatctatttcgagcccctcgtcacctatgacgaaaagctccagaaagtcgtcggcaagctcgcctcgtcctatgaggtcacccccgacaagctgacctataccttcaagctcgcggatgccaagtggcacgatggcaagccatttaccgccaaggatgcgaagttcacgatgggtctggcgcagaatgccaagaccggctcggtgctggctgcgcgcctgaccgccgtttcttcggtggaggcacctgatgacaaaacgctcgtgatcaagctttcggcgccctcggccagcctgatggacaccttgaccaaggtcatgatgctcccggagcacgcgctttcacagatccccgccgatcagctcgccaagaatagctggtggtccacgtcaccgatcgggaccggtccattcaagttcaccaagtatgtgaacgaccaatatgtcgagctcgccgccaatgccgattatcgcggcggaaagccggccctcgagaagatcatcaaccgctatttcgcaaatccggcggccgccatcgcagccttgcgggctggcgagatccaattcacctatgtcgacgccaacgatctgacggccttcaaggacagcagcgacttcaaggtgatcgagggcgactccttcgtcgtcaactatctcggcttcaatcacgattcgccgatctggaaggatctccgcgtccgccaggcggtgatgtatgcgatcaaccgcgatgccatcatccagagcctttatggcggggcggcaaagcaggcaaactgcgcctacgttgccgaccagatcgtgccgaaagatgtcgaaacctatgcctacgatcccgagaaggcaaaggccctgctcgcagaggctggctgggataagatcaacggcgacaagccgataaccctcttgacctattatacgacgcctcttgccgcgaatgtcatggcggcggtgcaggcaatgctggcgcaggtcggcatcaacgtcacgccccgcgccgtcgacacgcccacctataacagcatcgtgctcaacgcgaagccggatacagcgcaattccagatggtctatgcgggcctgcagaacggccctgatccgggcagtataaatgtcggactgaacgagaagcagattccgccggcgggtccgaatgttgcgcgtgtccgcatgcccgatctgacgaaagcactcgatgcggctcttgccgaaaccgatgccggaaagcgggacgctcgctatcaggatgtctgcaaggtgatgaacagccaattgccctggggcacgctctgggtcgcaaatcgctacggcgtcgtctccagcaagctcaaggattttgtctggactccagcaccgggcggtgggccctacgaggcacagccggaaaagtgggcgatctccgagtgaggatgccttaacagcaaagaggtggtggccaatgccgccacctcattgaagcggaaatctcatgttgacctacagtctccggcgcttgctgatcggagtgggcatgcttgttgccttgagcgtgctgatcttcgtgatgctgcgtctcacacccggcgatccgatcgacgcctatatagaccccaacgttccggtttctccggccgtgcttgcggagctgcgcctcaggctcggcctggatcagcctttgccggttcaatatctcgcctggctgcaggaggctcttaccggcaatctcggctactccacgaagcgtccggatcaacccgtcctcggtctcgttctctcacgcatcggtccgactgtcctgctgatgggaacggcgatcgccattgcaatcgttgccggcatcgcctcgggcatcatcagcgccgtgcgccgcaattccattgccgacttctcgttttccatccttgccgtgacgggcatttccagcccgcctttcctgagtgcgcttgtcggcctatatctcttctccgtctatttcagcattctcccctcgggcggcatgctgacgcccgggcgcgatttttctcttggcgacctgctctatcacctgatcctgccggcatccctcctggcggtagctcagacggcgctgatcatgcggtatatgcgcgcctcgatgctggaagtgctgaaccaggactatgtccgtaccgcccgtgcgaaaggcgtgttcgagttctgggtgatcgtcaagcacgccacccgcaatgcgctgctgcccgtggtaacgctgatcggctcgaccatcgggctggccatcggcggcgccattttcatcgaaagcgtcttcaactggcctggcatggggctcttgatggtcaatgccgtcgagacgcgcgactatcccgtgatcatgggctcgaccctggtgatcggcgcctgcgtgatcttcgtcaacatcctgaccgatcttgcctatgccgtgatcgatccgcgcatcaaggtgggctaagcgatgctggcaagaacaccccaacgcagtcccggcccgctggcacgcgctttcgaccgcttctgtctgaacagggcggcactcctcggcgttgcgatcatcgttcctgtgctggctgcaatcctcagctattctctctggctggggttcaagcccaacgacattgatctcctcgccatgaatgccgggccgagtgccaagcactggtttggcaccgacggcgtcgggcgcgatatatttgcccgtgtcctggaaggtggccgcatatcgctgatggttgcgcttgcatcgacggtgatctccgctgctatcggcttcctggtgggcgcaatctcggctcttgccggccgactcacggacgcattcaccatgcgtttcgtcgatctcgtcatgacccttccgccggtcatcttcctgctggtactcgcctcgatagcgggaaccggcatcgtcccgacggtgttcgtcatctcgttgctctcctggcctcttctggcccgtatggttcgcgcgcggcttctggagcttcgcgagcgtgatttcgtcaccgcggcaagaggaatgggcgccgggctcccgcatcttctgttccggcacggtcttccgaactcgatcgatatcctcgtcgttttcgcaacgttgcagatcgccaatgcgatcctgctggaggccggactttccttcctcgggctcggcatcgctccgccggcggcaagctggggcaacatgctgaatgcagcccgttcgaccgccgtcctcgagcaatatccctggcaatggctgtttcccggtggggcgctcgtcctcaccgtccttgccatcaacttcatcggcgatggtcttcgcgacgcgttcgaccctcgcgcggacctaaactgaccatcgaaagaaagctaaaatgagcaagttcaagggtgtcgttcctcctgtcgtcgtaccgctgaatgtggatttcaccgtcgactatccgtcctacacgcgggttctcgaaaatcttatcgaagcggggtgccacgggcttttcgttctcggctccaccagcgaggtcgtcttccacgatgccaagacgcgccgcgagatcatcgaacactcggccaaggtcaacaatgggcgggtaccactgatcgtcggcgtgatcgacgcgacgaccgatctcgtcatcaatcatacgaggatcgcgaagtcggcgggggcggatgccgtggtcgttacggcgccctactataccgtcaccagccagagcgagatcctcgatcactttcgcttcatccgcgacgccgtcgatgtgccgctgatcgcctatgacattccggtctgcgtccacgtcaagctgcagcgtcagacgacagtcacgctcgccaaggaaggcacgatcatcggcctgaaggattccagcggcgacgacggcaatttccgctatgtcctgctcgatctcgccggcaacaaggaaatcttcctgatgacgggctccgagatcgttgtcgacaacgcgcttctcatgggtgcccatggcgtcgtgcccggaatcgccaacgtcgacccgcacggctatgtccgcctctggaacgctgcgaagagcggcgactgggaagccgcccgcaaggagcaggaacgcctctgcaagctgttcgagatcgtctgggtgggaagcggccgcgtcagtggcggagcctccggcatcggcgccttcaaggctgcgatgaagagcctcggcatcatcgacactgccctcatgccccgtccgcgtgcagcactgaacgaagccgagaccgccaggatcaacgacatcctgcgcgctacgggccttctttcctgatggaagcgatgaccatgacggctggcaccattctcgacgtcaaggggttgcgaaccgtctttcgcatccgctcgggcgaagtgacggccgtcaacggcgtcgatctgacggttgccgccggcgagaccttggcgctcgtcggcgaatccggctccggcaagtcggtgacgagcctctcggtcatccgcctcctcacccgcgggatcggccagattgcggacggctcgatccatctgaaacggaaaaacggaacggtcagcgaactgaccgctcttggcgaaccggatatgcgggcaattcgtggcaatgatatcggaatggtgttccaggagccgatgtcgagcctcaatccggtctacacgatcggcgaccagatttccgagcctctgcgtattcaccgccgggcggacaagaagtccgccatggaagcggcaatcgcgttgctcgacatcgttggcattccggatgcgcgccgccgggccaatgagtatccgcacgaactgtccggcggcatgcgccagcgcgccacgattgccatggcgctcgcctgcgatccgacattgctgattgccgatgaaccaacgaccgcgctcgatgtcaccatccaggcgcagatcctcgagcttctgcagaggctgcagcgcgagcgtggcatggcgatgctgttcgtcacccataatctcggcgtggtcgccgaaatcgctcaccgggtcgccgtcatgtatgcgggccggatcgtcgagacgggtccggtggcagacgtcttccgcaatccgaggcatccctacacaatgggtctcctcgcatcgatgccgaagctcggcgacgcaacccgcatgaagcaggcgggggagatgctgaacgccattccgggcgtggtgccgagccttggaaacatgccgcccggctgcgccttcgaaccgcggtgccgctttgcgacagaggactgtcgtcgcgccataccgccgcttttcgacgtggatgcaaagcacaagagccgctgcatccattggcaggagatctagacgatgagcgaaccactcctttcggtccgggaccttgcaaaggattatgtttccggcggcaagacgataaggatcctgcgcggcatctccttcgagatcggcaagggcgaagtcgtcggtctggttggagaatcgggcagcggcaagacaacgatcggccgcgccgtgctgcggctggtcgaaccgaccgccggcagcgttcgctttgcgggaagcgatatcaccaaactatccgcatccgaactgcggcgcgcgcgaccacggatgcagtatatctttcaggatccgtttgccagtctctcgccgcgcatgacaatcggcgaaatcctcaccgaaggcctgaagatacagaggatcggcacctccagggagcgggccgaacgggctcgcaaggcgctggagcaggtcgatctgccggccgatgccgtcaatcgttatgctcatgaattttcaggcgggcaacgccaacgtatcggcatcgcccgggccctgacgcttgccccggagttcatcgtcgcggacgagccggtctcggcgctcgacgtgtcgatccaggcgcaggtcatcaatctgctgcgtgatctgcagcagcggctcggcctgaccatgctgttcatcagccacgatctcgccgtggtcgaatatatctgtgaccgtgtaatcgtcctttatctcggccgcatcatggagatcgccccgagcgccgaactctacgcccggccccagcacccctatacgaaggcgctcctttcggcgatcccctcgcttgatcccggcgctccgcgcaaccggcagatactgaagggcgacattccgagccctgccaaccctccaagcggctgcgtcttccgcacccgctgtcccaacgccctgccaaaatgcgctgacatcatacccgagctcagagaaataaggcccggtcatttcaaggcctgcatccgcgatgatctgaactgacagagaaagacacacgatgaccaaggccgcgcggcgccatccaatttccggcaactgggcaaccctggtcctgccgatcgctgaagacgacagcatcgattttgccgctctcgaaaaggaaatcgacgccctgatcgcggctggagttgacggcatctattcgaatggaacggccggcgaattccacaaccagaccgaagacgagtatgaccaagtccaggaaattctggccagtcgctgccaggcagccgggatgcctttcgtgatcggtgcctgccagcccgctcctgtcatcatgctctcgcgtctgcgccgcgccgtcttgctgaagccattggcaatccaggtcattcttcccgactggtggcccgtcaccgatctcgaagccatcgacttcctgaagcgggcatccgaggccgcggacggcatcccgttgatcctctacaacccgccgcatgccaagcgcgtactcggccccagggagctcaacgacatttgctctccctgcccttccgttgtcggcatcaagctcgccgatggcaacgcagattggtatacagaggctcgggctcatctgggccaatacagcctgttcatcccgggtcatcacctggcgacgggcgtgaaggaaggggttgccgcgggggccttttccaacgtcgcgtgcctgagcccgaaaggtgcccagatgtggaccgagttgatgaagacagacatcgattccgctctcgacatcgagcagcgcatctgcgctttcatggaccgccatatcgtgccgttccggcgcgatcagggctattcgaacgcggcattggacaagttgctcacggtcattggcgcctgggccccggtttccagcaggttgcgttggccgtatcgatcgattgacatggaccgggccgctagccttcgagacgtcgtcatcgggatggttccggaactcttcgtctccgaggtgcggtagcgagccggagcacgcgcggcatacgaggctcgcctgcctgatcgcaagggcagcgctcatggctcggcctcacatattcggatagaccggcccgtcgccgccctgcggcggcacccagttgatgttctggttggggtccttgatgtcgcaggtcttgcagtgcacgcagttctgggcgttgatgacgtaggtctcctcgccatccttctccacccactcgtagacgccggcaggacagtagcgcgtcgaggggccggcgaagacgtcgtgctccgacgacttctgcagcgccatgtccctgaccttcagatgcacaggctcgttctcctcgtgattggtgttcgacaggaacaccgaggagagacggtcgaaggtgagtacgccatcgggcttgggatagtcgatcggcttgtgcttggaagccggttccagcgactgggcgtcggtcttgccgtgaccgagcgtgccgaagaaggaaaagccaagcaattggttggtccacatgtcgagaccgccgagtgcgacgccgacagccgtgccgaacttcgaccacagcggcttgacgttgcgcaccttcttcagatccttgccgatgtcgcttgcgcgccattcgttctcgatctcgatgacctcgtcattggcgcggcccgccgcgatggcgtctgcgatcctgtccgccgccagcatgcccgaaagcaccgcgttgtggctgcccttgatgcgggggacgttgacgaagccggccgagcagccgatcagggcgccgcccgggaaggtcagcttcggcaccgactggtagccgccctcggtgatggcgcgggcgccataggacagacgcttgccgccctcgaacgtggtgcggatcgatgggtgcgtcttgaagcgctggaattcctcgaagggatagagataggggttcttgtagttcagatgcaccacgaagccgacggccacgaggttgtcttccagatgatagaggaaggaaccgccaccggtcttcatgccgagcggccagccgaaggagtgctgcacgaggccctgcctgtggttctccggcttgacctgccagagttccttgatgccgatcccgaatttctggggctggcgatccttctggaggtcgaaccttgatatcagttgcttggcgagcgagccgcgcacgccttcgccgatcagcgtatatttgccgagcagctccatgccgcgggtgaagttcgggccgggttcgccgttcttctcgatgcccatgtcgccggtggcgacaccgatgacggcgccctcctcgttgtagagcacttcggtggcagcgaagcccggatagatctcgacgcccaaggcttccgcgtggcccgccagccagcgacagacgttgccgagcgagacgatgtagttgccgtgattgctcatcagcggcggcatggcgaagttcggcaggcggatcgaaccggccgggccaagcaagaggaagtggtcgtccttgacctcggtcttgaagggatgatcggcctcttcacgccaatccggcagcaggcgatcgataccgatgggatcgacgacggcgccagagaggatatgcgcgccaacctccgcccccttctccagcacgacgacggagagctcgggattgacctgcttcagcctgatcgccgccgacaggccggcgggaccgccgccgacgatcaccacgtcgaattccatgctttcgcgttcgggcaggtcttgcactggaggggttgtctcgctcatcattgctcctcgaggctgcgaatgcgcgcaagtatcgagcgcgcccgcgttctgacaggctcatcgatcattttcccatcaatcttgacggcaccggacgaaggttccagcacgcgcttcgcccacgcgatttccgtatccgtcggccgaaagccctcgagggccggagcgatctgtgacggatggatacagagcttgccaccgaagccgagacttcgagaatagcgggcgtcatctgaaacgtcttgaggggcatcgatgctggccgtgacaccgtccaatggtgccagaaggccggccagccgtgatgccagcaccagttcgagacgtgccagcagaagggcctcccgaacgtgaccgcaacccatatccgcgcagaaatcgatcgaaccaaaggcaactcgcgccaccccctcggtctcagcgatccgccgtgcgttcgcgacgccccgcgccgtctcgatgagcgcgatgaccggcattcccgtgcgcttgtggacgtcgcgcaggaagtcggcattttccgccttgggcatcatgacgcccgcgaacgtccgctcggtcaatgccgcgacatcgtcatcgaaccaggcggtatcccgcccgtttactcgcacgaccaccggcagcgcggtgaaatcggcccgaatggatgcgcgcgccttattcttgttctccgccgctaccgcatcctccagatcgatgatgacggcatccgcgccacgggcggccgccttcgaaaaccggtccggcctgtcgccgggaacgaagagcggtgcgacgaaatcgagacccatcgccgtcaacctttcgccatcggccgctgcagcaacccgcgcgcgattacctgcgcctgaatctcggcggcaccttcgaagatgttgagaatgcgcgcgtcacatagcacacgcgagatggcatattcggtcgcgtagccattgccgccgtggatctgcagggcattatcggccgcggaccaggcgaccctggccgcgacgagcttcgccatgcccgcttcgacgtcgcagcgggcacccgtctccttcaaccgcgccacccgcttgaccagctgccggaccattgcctgttcgaccgccatccaggcgagcttgccgaacacgcgtggaaactcgatcagcggcctggcgaactgaacccgatccgtcgcatattggaagccgagctgaaaggcattctgggcaacgccaagcgcccgcgccgccgtctggatacgcgcaagctcgaaggtcgtcatcaattgtcgaaagccctggccttcgacgccgcccagcacgttgcccgccgggatttcaaagccatcgaatccgagctcgtattcacgcatgccccggtaaccgaggacatggatctcgccgccggacatgcccttcgccgggaacagatcgccctccgtgccgcgtggcttctccgcgatgaacatggtcaggccgcgatggccggaattggctgcgccggtacgcgccaggagaaccatgatatcggcgcgcgccgcatgcgtgatccatgtcttggcgccatggatgcgatagacatcgccgtggcgttcggcgcgcgtggtgaggttggcgagatccgaaccggtgttcggctcggtgaagacagcggtcggcagaacttcacccgatgcgatgcgcggcagccagcgttgcttctgctcttccgtgccgcccagacggatcagttcgcttgcgatttccgaacgcgttccaagcgagccgaccccgatatagcccgccgacagttcttccgtcaccacgcacatggcctcggcgccgagttccgatccgccgaattccgccggtgtcgtcatgccgaacacaccgagttcggcgagttcggacacaagctcgatcgggatcaactggttctcgccgtgccatgtctgggcatgcggcacgatcttgtcgcgggcgaaggatctgaactgttcgcggatcatggcggcggtttcgtcagtggcgtcgccgctgtcgatcaccgcgtccggaccggcctgtcgcagaagcgcgatcagctcggcgtgtctttcggttccggtcgatgtcagcgagcgaacgtcggcagaggtcaggaaatcctgcgcttcgcgacccaggccgtagctgtccgggcggatgatttcgtcctgcgacatggcaatgccatgcccgatctgggcgagatattcgccaaacccgatttcgagcacgagcccaggcaggcgcccgagcgcaccttcggcctcgagctcttcggcccagctcagcgtcgccttgaggatttcgacgtaggacgccatccaggcatagccgtgcgcctcgatctggttcgcgttgagcgcggcggcatcgaaatcctcgtccggcagacagagcgcggcgacacgggcgcctacggccgcgagcagcgtttcggccgcctgcagcgccgccttcgcgcggccaagtgtctcggtgctggtcgagagtgtgtggtcaacggtcatcgctgttcgtcctttttcatgcacggagagcttcggccgtcatcgcgacggcgccggcctggtcaaaagcggtcagtgaaattgcgccgttctcttcacacgagcctctcagcgagacggtgccgtcgcgaaagagcggcttctgggcccggaaggaaaacgaggacactgcggcgccgccggtctcggcgagcccgctcagcatcatcgccgtcaacgggccatgaacgacgaggtccggatagccctcgacgccggtcgcatagggatgatcgtaatggatgcgatggctgttgaacgtgagggcggaaaaccggaagagcctgacggcgtccgccgtgaaggagccagacagcgcggcatcggggatgggctggccggcggattgcccagggtttccaggttgagggtcgagataaacgtaactctgctcctcctcgaggcaggtcacgccatcctgcacgaagcgatacgaaaccgtcacgagcaccatcgggccgttgcgaccctgcttctcctcgatccgctcgatcgtttcgcggcgcaccgccggcgttccgagtttcaacggcgaacgtatcgtcgttcggccgccggcgaacatgcggcggtgcagagggacgggaggcaggaaatcgccgcgcctggggtgaccgtcatcgcccgtttcggcttgcgaaacgacaggcaggaaaaagacccattgccacaggatcggcagtgcgtcgccactctggaaagtatcgccccgcccgaggacggccgcgagagccgaggctttccaggggtcgagcatatccgtggcttgccgggaccggcccagataggtgtcgaactcgctcatcggaactgaccccccatgcttggatcggcctctgggcctgcaacgatgccctggtcgtgcagcttgccgatcgcgccgctcgacaggccgagaacgtcggacaggacggcgtcggtatgttcgccgagaaccggcgccgcgacgaccgggccgcgctcgatgccggcaaaccgcgcggtcgcgccagcggcgatatgtcggcccgcgccttgcgtctcgatcatctgaaaaaccgggttctcggtcgaaacgcgacggtcgcccgagacgagttgccgggcgctcttgtaatcgccccagcagacgcccgccgcatcgaaggctgccgcgatctccgagaggtcgcgcgccgcgatccagggccggatggcatcggcaatcgcatccctcgccgcgtagcggtcggcctcgagggcgagagagagccccttgcccgcttcgatggccccgacggcatcagccaggccgcaggccgcgacaagggactgccattgtcgggccgagatggcgatcaccatgatccgccgcccgtccctgcacgcgaagtcacggccgaagccgccatagacatcgttgccgatcgccgggcgttcgtgatccagaagctccgcgtccgccagtacgccgagatgcgacagcgtcgagaacgccacgtcggcaagcgagatgcgcatctcggcaccttcaccgctcacctggcgccgggtatgcgccgcaagcaccgcgaatgccgcctggccggcacaggccacgtcccaggcgggaagaacatggttgaccggcctgtcggccccggcgtcgccggtgatcagcggatagcctgtcgcgcaattgaccgtgtagtcgaccgccgtcgtgccatcgggattgccttcgatggtgcaggtgatcacgtccgggcgcgcctgcgcgagtttttcgtgcgacagccagggggccgcaacattggtgaggagaacgccgctttcctgcgcggtgacgagatcggcgaccagcgcgcgcccttcgggtttgcgcagatcgacggccagcgatcgctttcccttgttcagccccgtccagtagaggctgcggccgttcggcatgacgggccaacgcgcgtagtcgatgccgccgccgatcatgtcgatacggatgacatcggcgccatgctgtgcaagcgtcagcccgccgagcggggcggcgacgaaggcggaactttcgatgacccgaaggcctttcaggaagccgtaggtcatcgtgtcacaccacccgctcgaagatcgccgcgagcccctgccccccgccgatgcacatggtctcgaggccgtagcggctctcccgacgctccatctcccgcagcagcgtcgtcaatatacggacgccagtggcgccgacggggtgcccgagggaaatccccgacccgttgacattcatgcgctcgaaatcctgcttgccgaaaccccattcacgcgtgcaggcaagaacctgggcggcgaaggcttcgttgagttcgatgaggtccatgtccttgagcgacaggccggtccgggccatcagcttttgcgtggcggggaccggacctatccccatcagatcaggagcgacgcccgccgcggcccagccgacgacccgtgccagcggcttgaggccaaatttttccgccatggcgcgggtggttacgatgcaggcggcggcgccatcgttctggccgcttgcatttccggcggtaacggtcgcctgcgcgtcctgggccgacatgatcggcttcagcttggcaagcgtcgagacatcggtgtcggcgcgggggtgttcgtcacggttcagggtgacgggcggcttgccgcgctttgccggaaccatgaccggcacgatttcctcggcgaagcgtccgtcctcgatcgcggccatcgcgcgctggtgggagatcacggccagcgcatcctgctcgtcacgaccgacattgtactgccggcgcaggttttccgccgtctccagcattccacccggaaccggatagcgttcgccacctgccgtcacgcgtccgcgacccagtctgtcatggagtacggtatcccgtccccgggcgccccagcggacgtcctcggaatagtattccgcacggctcatgctttccgcgccgccggcgatcacgagatcgcagacgccggtctggacccgcatggcggcgtccatgacggcctgaagcccggagccgcagcggcggtcgatctgaaggcctggcaccgtgatgggcaggcccgcatcgagcgcggcgacacggccgatcgccggcgcctcgccgttcggatagcattgcccgaacagcacgtcatccacgcgctcgggatcgaccccggtcctcgcgatcagcgcttcgatgacggttcgtccgagcgtggctgcgggcacgtcgatatacatgccgccataacggccgaccgccgtgcgcaatggctcgcagatgactgcatcccgatcgctcatgatacaactccttcggtgggaatcttgaaatccggatcggcgctgaaggcttcggcccactggcggagcgtcgcggccttgacctttgtgccgttgacgcccgacgtcaccggcatctccgggataatgtgaatgacgcttggaaccttgtagcgggcaagctttgccgcgcaccacgcaatcagtgtcttcgcgtccagttcgagcccggcgcgcggcacgacgaaggcaaccgcgatcgtgccgccgtcctcgccgcggatgccgaccaccttggtgatctcgacagcctgatgttcaccgatgcgcgtctcgatttccgccggttcgacgagaaagcccttcagccggagaacgtcgccgatgcggcagagatattcgaagctgccgtcttccttcaccgagccgagatcgccggacttgaaccacttgtcgtcggtcagagccgtcgccattcgttcgggatcgcccagataggcatcgaccacgtttggaccctggaactgaagttcgccgatctcaccccgaggcaaagcggccccggtttcgggatcgccagccctcaccttgatatcggcggaaaccgggaggccgccgccgcgccaacgatccggcgtccctacatcgtcgcgccagaaggacgtcagggcgaagagttccgaggagccgtagacgcccgcggcggtcaggccgatcgtctcctcggcccattgggagatctgttcgcttcggccgttgaagtcggccatcagcaaccgcttccagcgcttcaggtcgcgcggccggcgctggagcgcctccacgatgcggccgacgatgtcgtcggcgccgacaagatggctggcgccgaagcgttccatgtcggctgttatggcatccgggtcgaaggagggctcgagcaggcactggccgcccgcggcgatcgtcgccagggcgggaacataagagaacacgcctgtcagaggcagcgcattgacggtcacgctgtcggccgtccagcctcccgccttcgcgcaggcaagcgcgtggcccgaaaccgccgataccttgtgagccgcaagcttcgagcgcccggtggaacctgacgtcgtgaaggcgacggccagcgcatcgggacgatcgtcgaggtcgacctggtccagctctgcaccaccggatgcggcaggcgcccaggcgcccgcgccgacgtcgtagaccccgacttcctcggcggtcgcggctggcttgtgcggtcccttgagcaccgcgacggacggcgggttcgatgtcgatgccgcaacggcttcgcggagccggccaccgagatcgagaccgacgaaatcatcggcgatggcgagcacgacgggcctggcgagattgaggacattggtgacctcctcgacgttgtagcgcgtgttgatgccgatgacatgggcgttgagagcgacggcggcgaattgccagacgagcgaatccgaccagttcggaagccagacggcgacgcaatcgcccgatcggacaccgcggctttccagctccaccttcagcgtcacgacccggcgccagaaggcacggcgcgacacgatcaggggatgttgcgggtgcgcgtcgatcaggatcggcgcctcggcgtcttcactcagcagatgcttgacaagtgcgatcatggacatggtcaggcgtcctccttcctcgggatcgtcgaaagttccttaagccagcggtccagcaactcgtcgaagccctccatctcttccatgggatagtggccgatgccgtcgagcagggtaaaacgggcctgcggcatcgccgccgccgtccttttcaccgcatccgcgtcgatccacagatcgtcgtcaccggcgaccatatgaacgggacagcgcgccgaccgcaggcgggaccatgcgtcgaaggacgcccagccgatgaggtccgaattcgagacgatcggatcctcgcgtctgtgcatgtcggcgatcagccgtcggcgttcctcgggaaccttgcggccgaccacggccagggtgccgaaatacgtacggtcggagcggctcgcggcggctgaatcctcgagctcgcgcacaaggccgcggctcatccgctcgcccgcgcccttggccatgccggcatccgccgccatggcgatggcgcccgacaacgtcgcgccgcggctgcaggcgagctcgatcgcgatcttgccgccgatcgagcatcccacgacataagggcgctcgagctcgagctcatcgatcagccgcccgcaccaggccgcgtagtcgacaaggttctggacagcgccggatctcggcagctcggaacgtccatgcccgggcaggtcgggtacgatgacgcgatagccgcgcgcggcgagcgccgcgccaacatgtcgccactgcacgcctccctggccggcggtatgaatgcacaggaccggctgtccttcgccgatatcctcatgaaacgacaacgagccgtcgatctgccgatacgccgcacgcatcatgccagagcctcctcgcgatagaatgttcggatgacgtcgatcatcgcggtgagcgccttcgtcaggcgcagatattcgtaggctgaacccgatacggagaactgtccctgcatcgcccgtttcatcagatcgttggtctcgccggtgaagagcccggcccagacgatttcctcagccttcatcacgaaggccgggccgttggccgatctttgtccagcttcgagcacggctcccttgaagacgcgcagctggacctcatcgtcatcgcagccgatcgcgaacgtgccgtcccaggtggccgtcgcgcttcggaaagccgcgtcgttgcaaagccgctctccgagccgcgacgcccatgcgcgggtaaagaattcctggccgatacacagcttgcgcccatccgccttgatgagcagcgcggaccggccctcctgcagcaactcacccgattggttcgtgacgcggacatggcggccgaccacaccgcgatcgcccgacgagctacggcggcagcgcgtgatcgtcatctcgaacgagatctcgtctccgacggtgatcggcttcaggtaacgccagttggagtccagcatcgcgatcaggctgttcctggcgacccccgtctcgaagaaccaaccgagaaaggcggcgatcccgaacggcccgtgaaggatgggccggtcgaaaccggcttggcttgcgaaggccttgtcggtgtgcagcggatgccgatccccgcttatcgaagcgaaggacgccaggtcttcttccagaaccaggcgtggtggcgacgtgaaacgcgagccgacccgaaagtcctccagaaacatcgggacggcgcccgcctcgtggacgacgccggtcatgatgccagggctttcgcggcggaggactcctcgttcagcgtcgaccactcggcgaaatcgacgagcttgatccagtcgttgaaagccatcgtctggtcttcgaacgaattgcagtcgccggtttccctgaactgggcggcggtatcggcaatcgtctgcatgaccgcggcgatgaacgatgtgccgacggtgaggaggctgtagcctttctcatgcaaggttctggcggtgttagcggcctcctttcggccgccggccccggtgcggccctgcgcccggtcgccggccaccgattgcgacatgtggccgctgatttcgcggcgcgcgcgcaggaggtcgtcttcgctgtagacgcggggccagacgatatcggcgccggcttccttccacatgtgaaagcggcgaaggctttcctcgaaggcttcctccttgcttctgaacgagatcgaagaggtcgcgcccgagcgaaccatgatcaggaagtcatcgctctgccggcggtcgcagatcgccttgatcttgtcggcgatgctttccgccgacatcagcacggggagatagggcggcagccacgggcatttctcgtcgccgtaatcgtcgatatggatcgatgcggctccggcgcgttcgaactcgtgcgcccagcgcacggcgttggcgatatcgccctcgctgccgaaaccgctttcgaaatcgaccatcagcgggatctcgatgcgatcggcgatccgccagatggcgtcgcgcgtctcggccgccgaaagcaggccgatgtcgggcaggccgaaggatgccgcgagctgggacgagcccagtttgacagcgtcgatgccggcccgctcctcgatgatggcggagagcggatcccacacgccgccgcacaacaccatctcgcctctgtccagtttcaggcgcagatctgccttagccatgatgacttctccatttgctcggatgtttttcggtgtttagtcggcgacgaccgcggtgtggtgcggggcgaagcagaggctgacctcgctgcccacgggaaactccgtgtcggccgcggcgtgcgtctgaacgagcatgtcgccgcagcgaacctcgtaacggttcatcgaaccgatgaaggagacaagctccaccgttccgtccaactgattttcaccggccgtcgcggtctgctttggcgaaatgcggatgttttcggggcggatcgaaagctccactttcgtgcctttcgcctgcggggccgggaaattgccgcggatgagcgcgccgttcggcaatcggacggaacccgttccgttggccgccgcggcatcctcgacgctgccggccaggaggttcgtcgttccgatgaaagtcgcgacgaaacggttcgccggtcgaagatagatatccttcggcgtcccaagctgcacgatcacgcctcggttcatgaccgcgatctcgtccgacatttccagcgcctccacctggtcgtgggtgacatagacggtggtgacgccaagctgacgctgcaggcgcttcagctcggcccgggtggtttcgcgtagcgctgcgtcgaggttcgacagcggttcgtccagcaagagaagctgcggctcggcgacaatggcgcgcgccagcgccacgcgctgctgctggccgcccgacagcttggtcgaaggtcgatcgtagacctcttcgagagacacggcggccagcgcgcgccgtgtcttcgtctcgatctcgctttttgacagctttatgtcggagcgcacgcgaagcggaaacgacacgttttccgccacgctcatatgcggccagatcgcatagctctggaacaccatgccgatgccgcgctcgttgagcggcacggagatcccgcgggcgctgtcatagaacggacgctcgccaacgccgatgtaacccgtgtccggctgctgcagtccggcaaccgaccgcagcgtcgtcgtcttgccgcatcccgacgggccgagaagcgtgaagaatgttccgggcgcgagcttgaaggacacgtccttgattccgacgctcttgtctccgcccgtggcgaatagcttgtttagcgcgcgtacttcgagggtcatgacgatctccgatcattcagttctttacgggcgtagggatgcggaagcgcgatcatttctcgaacaggtccttgtagatcttgacccagccgtcgaacttggtggtgagatcgtccatcgtcaccatgtaggccttgaagccgcccgtatcggcgcgcagcgacttgtcggccggcggaaccttcggatggttggatatctggccggtcgacgcgatgaccttctggccttcttccgacatcacgtaatcgacgaagagcttggcggcgttgggatgctgcccgcccttggtgatcgaccagtaggtcagcgttccgaccgtcggctcgaaacggacccagtcgactggcgcacccttttcgatggaattctggacgtggtggttgaagaccatcagcgccagcggacgttcgccggcaatcgtctgatcgagaacgacgcgttgtgacgcagggacgttgacgatgtcctgctccgcgagcttgcgcaggtattccatgcctttttcctggcccatggtggccaggaccgcgccgatgaagccgggcgcgcccgtggcattcaagctggtggtccagcccatcttgcctttccacttcggatcgagaagggcctcgaaggtctttggcgcctcgtcgggctgaacgtccagcgtgctataggcgacagtcaggaaacttgcggtcggcgccacccaaagcttgttcggatcgacatagccggcaggatagtccgcggccgagtccggcacgaaaggttccgcgtagcccgccttgtacagaggcagacagtttgcgcagtcgaacaggtcggaggccatccggcctgccgcgccttcgttgttgatccgcagcgtaatgtcggcgccgttggaacgggtgtattcgaccttgatgccgtatttttcctcgaaggccctcgtcaggggtacgacgaagtcgttgacgatataggtcgtgtaccagacgaatgagccttccttcttggcggcgtcgatcagtgcctggtcggcggcgagcgcgggatatgtaacgccaagcagcaagctggcgcccaacgcggctctcttcagaaaatcacccatggtctctcctccgtgattaaggtgtttttcgttcgttccgatgtcagaacgtcttcgtgcgattgcgatgggatagccagaaggcgaacatcgcgatcagcgtcatcaccaccgtccaggcgaggcccagcgcggcaagctctcccgtctggccgttcgcccacaggtccagcatggcgacggccagaaccttggatcgcggtccggacaacagcaccgccagggcgagctccttggcgcagatgagaaagatgaatatccatgccgcggtcgccgacggcgtcagcagcggcgcgatgatccgccggaaggtgcccatgaccgtcgcgccggagacgcctgcggcctcttcgagctcgcggtggatctgcagcacgccggaatagttgtagcgcatgccatagggcagatagcgcagtatataggcgaacaggatgatccagagcgtcccgtagaccggcagcggcagccgcagaaagatctgcaggatggcgacacccatgacgatgcctgggaagatcagcggaaccgtcgacagttgatcgatcaaccaggcgaaggggccgcggcgcgccgcgatccaggccgcgaaggcggtgatcaggacaacgaccgtcgcggcgccggcggcgaccagcacggtgttgatgccatattcaagatactgcggagcctggaagagcgcggcgtagttgctgccgttgagataaggaatgatgcgcagcgagaatccgctggcgaaggggacgagcgacatccagaccagcgcgaggatcggcagcagaaggacgatcaggaaatagatcaggacaaaagcgcctgcaatccaacggcccttgccgaggtcgaaaggacgtgggcggaacgccttgcctgtaacgctctggtacttttcagcattcttggagaggcggccgtaaaagctgaacagcacgcccacgaagatcagcatcacgaccgaaaatgccgaggactgcccaagctgcggggggacgaccttcatgctctcatagacctcggtggtcagaacccggatgccgctcggcgttccgaccagcagcggcacctcgaaggcctcgacggcacgaatgaagacgaacatggccagcgcgatgattgccgggacggcgagcttgatcgaaatatgccacacggtctgcagaacgctggcgccgctcatgcgcgccgcttcctccatgtccgcattggcggaccggaagcttgccgaaagcatgaggaagaccagcggcgaccagaggaagccttcgatcaggatcatcccgaacatgctgttgacattgatcaggtcgccggaaaatccgaggccgcgccaggatgcattgaccggcccgatacgaccgagcaggaacaaccaggcaatgatgtaaagcacatagggcgttcccatcgacacgatggcggtcacatgggccaggatcttgaagcgcacattggtgcgctcgaccagccaggcgagcacgccaccgacagcgagagccaggatcgcgcttccgacagcaaagacgatgctggagaagaacgcgccgctcaggcgtggattgccgagaagatcgaggtagttcgaaagcgtaaatccgccgattgcgccagtcacctgattttccgcgaagctcgtgcggatcaggatgaggacggtaggcgcgacgattgccagcagaagcgccagcaggatcagtgcgatccacctcctggcatcggctttttgcgcaacaacgttcgtggcttggatagcggccatcgacgtctcctcccgagcatcgcgtgttttccaactgcgatgatgggtagcatgcggtgagtcatcatgataatagaaaatacttcaaagagttttcagttttttggaacggtcgatggaatcacgccagctcaaggtctttgcccgggtctacgaggagaggcacctgtcgcgcgccgcttggcagagcaacatctcgcaatcggctgtcagctttcacctcaagcagttggaagaggaatacggcacgcagcttttcgtgcgcgaggctcgcggaatgcggccgaccgccgcggcggagcgcctgtatcgccatgtagcgccgatcctgcggtcaatgcgcgcgctcgacgaggatatgaaacggtctcccgaccgactggccggagacattgcgatcggcatggcgacctcggcgatgaaagcgatcgggcgagacctgatcagcagcgtccttcagaaatatcccgaggtcaggctctccatcatggaggccataccggggtcgacgcttctcgaggttctcaagaccaacaccgaactggccgtcgtcttcaatccgttcgattatcccgaactgaagaagaagccgatcctcaaggaggaaatggtttgtgttggacggcctgacatcattggggcaacggacgaggcgatcgaagtcgacgaacttctggcgctgccgctcatttccttccgccgtctcggcaagctgatcgacgattccctgctgctcaagcagatcgatgcccgcgcagggatcaggatcaactcgatgcaggcgatcggcgacgccatgctggatggccacggctgcatgctcggaagccgcctttattttcgcgagcatatcgaggcaggccggctgcacttccgcccgattgcggggccgccggtggaaagaacgctgtatatctgcgaactggcagaacgccccgcgacgtcgatcaccgagacgatgtcggatctgctggtcaatctgctggcatccaaggtcagggatggcgcatggcgcgcgacactgctcgtcaattgcgagacggcggatcacgcgcgcgattgatgcgcagcccacatgtcacgcgcagcgcaccaccgccatgcgcgttcgcacgatcaggaacgcggcgccccggccatcctcggtcgtttgccctgcttcatgctgagttggtcgctagttttccagcgccggagacagccggctagccccgcccatcataggctttttgcgcagcaaacacctcatccatatttttctcggcccaatgcgccagcgccgataccgtttccgtcagcgtttcgcccaagggcgtgagcgcatattcgaccgtgaccggaacggtcgggaacaccgttctggagacgaggccgtcacgctcgagcttcttcagcgtctgcgacagcaccttttgagaaacccccgccacgtcgcgccggatgacattgaaccgtaccggctctccatcgaggcggtcgagcaccagaagcgcccatttgtctgccagtcgatccagaaccagccttgtcgggcagtcgctttcgtagatgttgtatggccgttccattccgtatctccagcggacgcacggtttccttgaagaaaccaggtgagcagaaagtgctctcttttcgagtttcaaatcgattgctaaatagcacctggaaagttagtatccaatagataccaggagaaaaccatgggaaagacactcgttttcggagcgaccggaaatgtcgggcggccactggtcagagggctcgtcgcgcagggatttgacgtgcgggccgcctcgcgcggcggggccgtggtcgacggcgcggaaggcatcgcgttcgaatttggaaagccggcgatgctggacggcgtattcgacgacgtaacgcaggcctatgtcctgctgccttccggctatgtcaacgtcaaggaattgctatcgccgatcatcgagaccgcgatcgagcgcaaggtcaaggtggtgttccagagcgttttcggggtcgatgccgatgacagcatcccctaccgacaggtcgagatcgcgctggagaatgcggccatcccttacgtgatactgcggccgaactggttttcggacaacttccataccttctggaagccgggcatcgaccatggccggatcgcgcttcccgcgggcgaaggcaagagcagcttcatcgacgctcgcgatgtagcggcctccgcggttgccgttctgagctcgacccagttcgatggtcgcgcgttcaatctgacggggcccgatgccctctcctatgcgcaggcagcatcgatcattgcgaatgtcgtcggccggccggttgaatacgaggcgatcacggacgacgcctttgtcgggatcctgaccggcgcgggcgtgcctggagactacgcgcatttcctcgcctccatcttctaccctgtccgcgagggctggaccgccgccgtgaccggcgacgtcgagaccctcaccggcagggcgccgcgttcggtcgaggaatatgtttccgacaatgccgctcttctgaaagcctgaccgcccacggcagcgcaggataccggaccaagcaaccaaaaatgcacgcgcaagggccgcggcgggcgaccgtccgccgacggcacttgcatccaaccggacttggagccggtgaagcgagcggatccgcgcggcgcacacgcgtgcttcgtcgtgtcgtccgcaaacacattcaagtgagcgctgaggacccaccttgaaaagcttgtgaaaattggtcggaaaaggccagtctttatcttgactcttttagtaatgtttttaattgatgcgcgcaacggcgtgtttgctgcaatgcgaaacgccgtctcgatattttagtttgcgtcagctgtccgccggcgcctctgcttgccgggaagggtccgcgccatgtcattttctttccaacgaacccctaagcatcgcggcctcctgagttcgacgatgcttgccggtatcgtcgcggcaacagtgctgaacgcatacgcggccgccgcccaggacggcaacgccacggacctccagacaatcacgatcagcggcgacaaggccaatccccggtccatcagcgaggacaacagcacggtcgtgcccaagcgcacgatctcaggcacgaagacggataccccgctggtcgagacaccacgctccgtatccgtcgtcaccggcgaggagatggaacagcgcgccgtcaccgacatgatccaggcggcccgatacagctccggcgtaacgaccggcgcgttcggctacgacccgcgattcgaccagatctacattcgcggcatcgagaccacgacgacgggcgatttccgcgatggcctgcgccagccgatcatgaactacggctcgttcatgacggaagtctatacggtggatcgtatcgaggtcctgaagggcccggtatcggtgatgtacggcgcggccagcgccgccggcatcgtcaaccgcatctcgaagctgccgctcgccgaagaacatcgcgaagtcgagctgcaatacggcacgatcggccgcaagcaggtcgccttcgattttggcggagcgatcaatgacgaaatcgactaccgtctggtcgggttggcgcgcgaaggcgaaggaagctacgacatcgccgacgaccgctacctcctgcagccgtccgccacctggaagccaagcgaggacacgaccttcacggtctacggtctggcgcagaaaagcgagaccggcgccagcgcctggagctacctgcagggcgatgacgtcttcctctacaccgacccggatttcaacagccagacggtcgagcaataccagctcggttaccagttcgagcagaagttcgacaacggcctgaccttccgccagaacgcccgcgccggcgatgtcgacctgaaggccaattacctgaaccgcgttcttgccaacaccgacggcagctggccgacgaccgcggtgacggagaccatgcgcagctaccagatcgacaaccagctcgagggccagttcgataccggcaacgtctcccacacgctgctcacgggcctcgactacacctgggtgtcgtccgacttcgccagcggcaccggcagcgtagcggccaacacgccggccgccggcgtgcctcttcccgcgctcagctacttcacgggcagcagcctcaaccagaccggcatctatgcgcaggaccagatggaaatcggcaactggcgcgccgtggcgggtcttcgctacgactgggcaaaccaggaaaccaccgtgaagggcaccggcggctcgaccagcgagaagaacgacggcgtcctttccggccaggtggggcttctctatctgttcgacaacggcatcgcaccctatgtcaactacggaacgtcgttcgtcccgtcgacggccctgtcggaagacggcgcggttctcgatcccaccaaggggcgccagatcgaagtcggcgtcaagtaccagccggaaggtgaaaactactcgctgagcggcgccgtctatcggctggtcgaaaccggcaagccgcaatatgcttccaacttcctgttttccgagaactccggagagaacacctacaccggcttcgaactggaaggccgcaccgagttcgacaacggcatcagcctgatcgccgcctacacctacgccaatgcggaaatcaccggcaacaacaacgcttcggtgatcggcaatgccccctccacggtgccgcgccatgtcgcctccttgtgggtgaactatcagatgccggagacctcggtcatccccggcctgacgatcggtggcggcgtccgggccatgagcagctcttacaccagcgatgcgaacacggcgaagaacggcggcgccgcctatttcgatgcggcggtctcctacgatttcggcgccgcgtctcccgatctcaagggcctgtcgctcgcggtcagcgccaccaacctcgccgaccggcgcgaagaggtctgcacagacgacttttgctataccggccggggtcgtacggtcatggggtcgctgaagttcaagtggtaaccggccccgtggccggtcgccgatcgacgcaagcgacaagcggggcgaacatggcggaacgaacatgactgaaaaggctcatgccttgccgggaacggttcagtttgaactggagccgatggacggtggcgatccctatcgcatcctgctgttcatcccaaagggagagccgcccgccggcggctggcctcttctggtgatgaccgacggcaatgcgaccttccccttcgccttcgccagcacggtgacacaggcgccctaccccagcggcaccaatgtcgactggggggttgttgccgcgatcggctatcccaccgacgaagcctatgatggaatgcgcagagcctgggatctcggccctccgccggtcaagtcctatccgccctatgtcgagggagggcctcccgttcgcatcggcggcagcggtcagctcgtcgacttcatcgagcatcggctttttccgcggcttgacgcgatggcacgcatcgatccgacgcgcagatcgctgttcgggcattccttcggcgggcttttcgcgctttacgcgctgttcgaacgcccgagccttttcgccaactggatcgccgccagtccgaccatctactgggaggcgagcgaaattctgaacaacgaggcaggccggcagcctgttgccggcccgtcggtcttccttcacctgtcggccggcgagtatgagggggacgcgcttgcgcccttccagtatcgcaacgaagacgccgcatcccgcatcgagaagaggaagagcgaacgcaccgtggcgctcgcacgcgagatggcggatcggctgcatgatcccgccaccgggatacgcacgcagttcgagctcttcgcgggacagacgcacatgtccgtgctcggaccggccgtcaatcgcgccgtgagtatcgcgtttgaacgcgcgcgcggatgatgatcaacagccgacctgatagtcgacgctcaatcggagaggaaacaccttgacctcgcacaagtccgggcaggacatgccccagtcggaaaaagcctttgaagtcagaaacgttggtctttcgatgcagggcaacccgatcctgtccgatgtcagtctcgaatttccggcgggcgaagtggtggctctggtcgggcacaacggatcgggcaaatccagtctcctgaagatccttggacggcaactgtcgtccacatcgggaacgatcacctgcggcggccgcgaactcggccattatggcgaccgcgatttcgcgcgagccgtcgcctacctgccgcaggatctgaacacgggcctggagatgacagttcgcgaacttgtcggttgcggacgctatccatggcacggagcgctcggtcgcttttccgagatcgacaagagcaaggtcgatgcggcgcttgccgcgacacacatagagatgcttgccgatcgcctggtgggcacgctctccggcggcgaacgacagcgcgcctggatcgcgatgctggtcgcgcaggacgcgcgctgtctgctgctcgacgaacccacggcggcgctcgatgtcgcccaccagatcgaggtgctttcactcgtgcgtcgccttgcgcatgaaggcggtcggagcgtggtgatcgtccttcacgatatcaacatggcggcgcgcttctgcgatcgcattcatgcactcaagcgcggccacgtcgttgccagcggcacgcccgccacaatactcgtgcccgacacgctgcacgatatttacgggatcgacatgaacgttatctccgcgcccaatctgaaccacccgctcacctatgcctgctaagtccggggttccgatgtccgtctcgcgaagagcctttctgcgatatgcggcggcgatgacggtcgtccccgcccccgtgttcgctcaggcatccggccaacggatcgtcagcctcgactatggcttgtcgtccacgcttctgtcgctcggcctgccgcccgtcggcatatccgatctggcggactggggtcggtgggtggtcgagccggccatgccggcttccgtggtcgatatcggcagctcgttcgaggtgaacctcgaaatcctggcccagctgaaacccgacatcatcctgacgacaccttatctcgacgagctgcagcccaggctgaagccctatgggaagatcgtccgcctggagatattcacgcccgacagcggacccgttcttggctcggcgattgccgcgacacgcaagctgtctgcggaaataggccgcgagagggaggcagaagcgttcctgcagcaatccgaaaccttcttcgagcgttgccgccagcggctggcgggaaaagacataccgccgatcgcgttggtgaacttcatggattcgcgtcacgtccgcatctattcgaaccctgggctgtttcacggcgtgctcgagcggctcggcgtcccgaacgcctggacgaagcaatcgaacttttggggtttcgaaaccatcggcatcgaggagctggccaagatcacggacccgaacgcacgcatggtggcctttgatcccgtgccgccggatgtcctgccgaaacttgccgagagcccgctctggaaccggcttccattcgcacgccccggacagctgtcgatccttgccccggccctgatgttcggaatggtgaacgaagccgtccggtttgccggtcttctgactgatcttctggagcgcgaccaatgatcatccctcgccgagacgtcctcggacccgcgctcgtcgtcgccctgtttctcatcgtcggaagcggcgcctcgctgctgctcgtgacgccctccttgagcagcccctccgacgcaagctacgacgcaacgcgattggtgctctattattcgacgctcccgcgtctggcgacggcaatccttgtcggtgcggcgcttgcgctggccggcgccctgttccagcaggttctgcgcaatcctctagccgatccgacgacgctcggcgtctcggcaggcgcgaacctcgcactggtggtggcgtcgctcttcgttccggggctgcttggagccagccgcgatctcgttgcgctcggcgggagcacgattgccgcggtgatcgtgctcggtctcggcgcgcgacgcgggttttcgccctattcgctggtgttgtcaggactggtgctgagcctgtggtgcggcggcctctccgcaatcctgacctatctcaaccagcgctatctcgcgagcctgttcatctggggaagcggatcgctgtcgcaacagagctgggccatccctgtctccctggcatggaaaatggcggcggtggcggtcgtttgcgccttgatcgtaaggccgctgtctatcctcgatctcggcgatagcagctcctcctcgctcggcgtcagggtgggacggctccgcttcatcgccatcgcctgcgccgtggcgcttgccgccttcgttaccagcgctatcggggtgatcagctttatcggcctggtcgcgccgacgctttcgcggctgtcgggcgcccggcgtccggggcaactgatcttctggtcgccgctcatcggggccagcctgctattttgcgccgatgccgtgctccagctggtctccggtggaataggcgacttcctgccgacgggcgcggtgacggcaatcttcggatccccccttctgctggcgctgctgccccgcctgaagatccgccatcggatacagcagtcttccacatggatcaggccacggcgatcacacgcgacggcatcgatcgccgtcgtcggggttgggctgttgctggccctggccatcagcctcttcgtcggacgcggcatcgacggcagcctttcaatcctgtccggcgacatcgcatcggagatcctcgccatccgggcgccgaaggtcttcgccgccctggcctcgggagcaatgcttgccgtcgcgggttcgatccttcagcggctcaccggcaacgagatgtcgagcccagaggttctcggcatcagcgcgggttcgacattcggcgtcgccatcggcctgtttgcgattgcgccgggcctcttcggccagttcacgttcgccgttgccggcgcgatcggcgtgctttcggtcattttcctgagctcccggcgatccggcttttctcccgagcgcgttctgctcgcgggcattgcgttgagcgcgatggtcgatgccgtcgtcggcgtgttgagctccacgggcgatccgagagcggccctgctcatgcgctggatgagcggctcgacctatctggtcgacggaccgaccgccgtggcggaaatgggtatcggcgcggtgttgatgaccatggctttcgcgagccggcgctggctcgatatccttccgctcggcccgtcgccgacatcggccatcggcatatcgctggcgaaatcgaggcttgtcctcttcgcgctggcgggcctgatgaccggcgcggcgacgctgaccgtcggtcccctgtcgttcgtcggcctgatgggaccgcatctggcgcgggaggccggcttgacgcgcgcattgccgcaaatggtcggcgcggctttcatcggcggggcgctcatggtgaccgccgatttcctgggacgtatgatcgtgtctccttaccagatccctgctggtctggtctccgccatgatcggcgcaccgttcctgatgttcatgatgcggaaaagagcctagtccggaaagacacttcgtggccaatcgttagaatccatcgtatgatgacagccttccattctgaattcgcaaagattcacgatgacattcgagcagctggttatcttcgtggcgaccgccgagcggcagcatctgacgcaggcggcgcaatcgttgcgactgacgccatcggccgtcagcgcggctatcaaatcgcttgagaccttctatgaggtgaagctgttcgacagggtgggccgtggcatccagctgacccgcgagggacgcgtattcctgcgcgaggccaaggaaacgctggcgaaggtgaaggcggcggaggccgttctggccgaactcggcaacctcaagaccggcatcctcgacgtccaggcgagccagacgatcgcgaactactggctgccgccgcgcctgctcggcttttctcaggcctatcccggcatcgacgtcaacctgacgatcggcaataccgccgccgtcgcggcagccatcatcaatggcgacgccgagcttggcttcatcgagggaatactcgacgaaccggccttgtccacctccaccatcgccagcgacaagctggtcgtcgtcgcggcatcggaattccgcgatgtggagaacgtgacggatctgtcgcggctgcaatggatcatgcgggaacgcggatcgggaacgcgcgcggttctggaacaggcgctcatcgagctctccgtgaatcctcgggagcttgagatctccctcatcctgccctccaacgaagcgctcttgagcgccgtcagaagtggcggctgcgtgacggcgctgtcggagacgatcgtcgcacccttcgtcgagaacgggcagttgcagatcctcgaattcgacctcccgccacggcgcttcacgcttctcaggcacaaggaacgccaccggacggcgccggccagggagttcgaagccttctgccgggccgccatgcaatgatgacgagcaaggggaccgaagtggtccccttgtcttgtcttcttgctgtcaggccctcttgctgtcaggctttgccggggcgattgatcgtcaggaagtggcggacgacaggcttttcggggccggcgtgatagccaagcaccttgctctgcagatcggcgtcggcgttcgacacccgcttgtgctgcctgagatgctccgcccaggattccaccatgaaccattcgacgatctttcgcggatcagcggagtcttccgtgacaccccagccataggcgccatcccggcggcgttcctgcgacatgtcgttcagggcgcggaggaaggccgagcggttgtccttctcgacattgtattcgatcaggatcagcaccggtccacggtcatgggcgacgggttcggcgacaagcggctccggccagtggctcgacggcaccagatcggcatcgccggcaggcagcttcacgcgatgcatgatgagaccggcgacgagcagaccgaccgcgccgatcaacagggcgtaagggacaccgaccgcttcgccaacggcaccccagccgaggctgcccgccgtcatcgcgccgttgaaaacggtgaggtagacggcaagaccgcgaccacgcacccagttcggaaggacagcctgcgccgcgccattgagcgtcgtcagagcggtgatccatgcgctgccgaggaagagcagagcggcgatcgcaaccgccttcggcggagcgagcgacaggacggccatgacgacggcggtcgtgatagccgcgccaagcaaaagcccatcggcgctcagacgctgacgcagccttggcatgaccagcgctccgccgatcgcaccggcgccgacagcgccaagcagaatcccgtagaagcttgcatcaccgccgagaagctggcgggcgacgagcggcaacagggcccagacggcactggcgaaggcgaagaagatggcggcacgcagcaggacgacatgcagtgggcggctggcccgggtgtagcgaaggccggcccggaaggcgccgaggaaattctcctgcagggcatcgttcgcgtttctggcgcgcggccaccagaccagcgcggcgataacgatgatgtagctcgcaacgtctgcgccataggtgagacccgcgccgaacgcggcaagcagaatgccgccggcggccgggccgatcgaacgggcgatgttgatgccgagggaattcagcgccaccgcgctcttgacgtcctcgcgcttgacgagttcgggcacgatcgcctgccatgtcggccccatgagcgccgcgccgatgccgccgaggaaggtgagaccgatgagggcgctgacggacagcatgcccgtctgggcaagaagcatcaggctgatgctgacggaggcaagcagcagctggacggcgatcaggaatttgcggcggtcgagaatgtcggtcagcacgcccgccggaatggcgaggaggaagatcggcagcgtgcccgccgcctggaccatggcgaccgcggccggcgaggccgagagatcggtcatcagccaggagcttgcgacatcgcgcatgaagctgccggtgttgccgagaacggtggccgcccagagaacggcgaagacgggttgcgcgagaggagcgaaactgccccctgaggattttgcggtactcatatttcagatcccttgctgacatcgaagatgcagccatattggcgagaaccactgccaccaacaattgcatcaatagtttcgatttaattgcaatatttgtaattatcagccagggacttttgctgtttgaagatgtttgggcagcggctccccgctgcccaatacccgatgcccggtacaatgcgtcgttcggtgatcgcgccggtatcaaacagcccagcaggagcatccgagcgcgccgaagaagcccttgagatccgctatcggcagcctggatgtccacgcgccggcatggtcgtggccgtggacgccgcaatcgctggcgcagccgcaggtggagatggccgtgcggcgcagcgagcgggcacccgcgccgtcgggctcaccccaggcggcgtagccgccgaacctgcgcaccggcgaccagtccggcatggctggcgggatgttgctttcgtcgagcgccttgaagtcgccggcgccatagacgatcttgccgccgaccatggtcagttccgacgtcaggaacgagatctcgtcctcggcgcaggcaaagaagtccttgctcggcaccacgagatcggcgaactgacccttctcgatgcggcccttcttgccctcttcgttggagaaccaggtgaccttttccgtccacatgcgcagcgcggtctcgcggtcgaggcaattggcgcgtggatagagctgcatgccgccgaccgtcttgcccgtcaccatccaggagagcgatacccaaggattataggaggcgacgcgggtggcgtcggtgccggccgagacattgacgcccttctcgatcatgcgcttgatcggcggcgtggcttcggcgacgccgtggccatagcgctcgacgaaatattcgccctgataggccatgcggtgctgcgtggcgatgccgccgccaagcgccgcgatacggtcgatcgagcgctcggaaatggtctcggcgtggtcgaagaaccagttgaggcccgccagcggaatgtccttgtcgacctgctcgaatacgtcgagcgcacgggagatcgtttcgtcataggtggcgtgcatgcgccacggccagcggttttcggccaggacgcgcacgacctcctcgagctcgccttccatctccggcgccatttccgggcgcggctggcggaagtcctcgaagtcggcggcggagaagaccagcatctcgccggcgccgttgtggcggaagtagtcgttgccctgcttgtatttgaccgaggacgtccagttgaggaagtcttccttctcctgcttcggcttctgcgtgaagagattataggcgaggcggacggtcagctggttttcgtcggagagcttctggatgacctcgtagtcatcgggatagttctgattgccaccgccggcatcgatcacgccggtaacgcccagccggttgagttcgcgcatgaaatgtcgggtcgaattgacctggtagtcgaagggcagcttcgggcccttggcgagcgtcgagtaaagaatgccggcgttcggcttggcaagaagcatgccggtcgggttgccgttggcgtcacgggtgatctcgccgccgggcgggttgggcgtatcgcgggtgtagccgacggcgcggagcgcggcaccgttcaagagcgcgcggtcgtagagatgcagcagaaacaccggcgtatccggcgcgaccgtattgatctcctcgattgtcggcagacgcttttcggcgaactggtgttcggtgaagccgccgacgacgcgaacccattgcggggccggcgtgatcgccacctggcgcttcagcatgtccatcgcatcggccagcgaacgcacgccatcccagcgcagttccatgttgtagttcaggccaccgcgcacgacgtgggtatggttgtcgatcaggccgggcaggacgcgcttgcccttgagatcgacgatcctggtgtcggggccggcgagcgccatgatctcggcgtcggcgccgacatcgagaaaggtcccgtccttgatggcgacggcgctggcggtcggattggtgcggtcgagcgtggtgatcagaccgtggtggaggatgaggtcggcgaacatgggatatgctcctggcttcattattaagattgatttcaatgctttgcgtcgcggcaagcgcccaccgcaagcgaatctccccttgcggtctcagctatcagatgcgggctgatcctggcgagacgcagcgacgtcatttcggctctcgcccttcggcatgtgcccgaacatgtgaggcttgatctggttgatccacgacatcgccgccggctccctggcgatcagtgtcttcgcgaagggaatgagctgttcgccgagcaaaatgccaagcaggccgacaagggccacgaccggcggcgcgggagagcgaacattgagcaggctgtaaacaataccgaccagaagaccggcgccgatggacaggaggtagagtttcatgggggcattcctcgatcgatcaatgaaagccgcttccgcttttggacactcgatccggcggaagcggcaatgatgctgattatctggctgggttggggccgatgcgcttgccgtggccgacccgctcgtcgccgccgtggacatgcgtgaccgcgtagtcgatgcccattccgtaggcgccggaatgttccttcaccagcgcggtgaccgcgttgtaggtttccttgcgggcccagtcgcgctgccattcgagcaggacctgctgccatgtcacggggatgacgccggcctgtaccatgcggtccatcgcatatttgtgggcgtcgaccgaggtgccgccggaggcgtcggcaaccatgtagatttcgtagtcgggaacatcgtggagggccgacagtgcgaaggtggtgttgcacacttccgtccagagaccggacacgacgatcttcttgcgaccgcttgcggcgttcctggcaagggcgtcacgaacgttctggtcgtcccaggaattcatggaggtgcgctccagaatgtcgttctccgggaacacgccgagcaattccgggaaggtattgccggagaagctttccgtctcgaccgtcgtgatcgtggtcgggatgtcgaagatcctggccgccttggcgagaccgacgacgttgttcttcagcgtctggcgatcgatcgactgcacaccgaaagccatctgcggctgctggtcgatgaagataagctggctgtttgcgggggtcaggacttcgagcttggacatttgatttctccatttacgtttttgatcgccggcatggcggttaaggattgggatgcctccggcggtcggctgcctgcctcaggcagccgttcgaaggcggaaattattggcgttagagatgcgcggcggcttgccgtgcgggttatgccgccagcgggaccaggttctcttcgatctggccgcgataggcttcataccggctcggcagcttcaaggcctcgccgaggtgggcggtatcttcgtcacggtcgaagccgggttcgttggttgcgatttcgaacaggatcccgcccggcgttctgaagtagatcgcccagaagtagtcgcggtcgatgaccggcgtcacctgatagcccgtgtccatcagggcctttcgcacttcgagctgcttctcgcggttctcgacggcaaaggcgatgtggtggaccgagccggcgccctggcgggcaaacggcgttttcggtagcgacgcgatgtcgatggtatcggcaccattgccaccgggaatgatgaaccgcgtgacgtcaccttcgacctcggcgcgctcgtagcccatgaactgcaacagttccgatgtggcggcggtgtcgtgcaggtcgaagcgcgcaccggagaagccgcggatcgcattgtcttcagagataccttcggcaagccatggggcgcgggcgtcttcggcggtttcgatcagcgccagtccgtcgccatcagggccggcgaagcgcaggcggttggcgccgaacaccgtgtcggccttcagaccgacgacaccctgggccgtcaggcggtccttccagaaagccagcgatcccctggggatggagaactgcgtctcgctgacttcaccgacgccgggacggccggtcatcatgtgcgggaagggaaagtaggtcatgacggtgccgggcgtgccgttttcatcgccgtaatagaggtggtagacgctcgggtcgtcgaagttgacggtcttcttgacgcgacgcaggccgagtgcgctggtgaagaaccggttgttctctcgggcatccgacgccatcgaagtgacgtggtgcagtcccttgatatccttgatcatggccgttgcctttctctgtgggcgttgccgtttcgatgaccagagatgtaaccggcttgattgcatcgcggaattgcaatattcctgtcgaatgaattgcgatttttgaaataattgagatgaacgactataaagccctgaaaaccttcctgcttgccgccgaaaagcgcaacttcgcgcaggtcgcccgcgagctcgacatgacacccgccgccgtcacccgcgcgatcgcggcactcgaagacgatctcggcgtccagctcttcgtgcgcaccacgcgccaggtatcgctgacgacggatggcgccgtcttcgccgcgcagatccagccggctgtcgaagcattggaaaacgcgcgcaaggacgtcaggaacgcgcacaaatccgatcagggccggttgcggatcagcgcgccgacctggctcggcaagacgatactgacgccaatcctgtcgggcttccgcgacctctatccgaagatgagcttcgaggtttcgctgtcggacggcttggtcaacatcatcgacgacgattacgatctcgcgctccgcatttcctccgctccctcggacaagttcaccatctggcgcaagatccgggcggtgccgaggatactggtggcggcgccgggcagccggttcacgcggatgcagcatcccagcgaactgacgccggacgattgcctggcctacagtggcgaaagccggcgggagcactgggcgctgtcggacggcggattgagcatctcgatcacggccggacgcgcattcagcgccaacaatggcgaggtgctcgccgacatggccgccgatggcgtcggcgtcgccatgcttccgggctttcacatcgccgagcatatccgcaccggccggctggttcacgtcttgccgggctgggcaccgccggagctctggctgacgctttattacccgccatatcaggccctgccgccgcgtatcgcgacgttctcgaaatttttcgaggagcaactgccggcgcatatggtcatgctcgattgacggtatattgatcgcgctgtgagctatcaccgataagttggttgaaagcggcacggttgcggatatcttcgcgcgattgatgaccgatttttgcgtatgctacgccagccgataccggatgttccggccccgtcggcggcggcatgtatatagtgacctggagcaagcatgaccttttccgttccctccctcgacgcgctcgccgacgaagccaagggctggcgccgaacgatccaccagcatcccgaactgctgttcgacctgccgaagacggccgcgctggtgacggagaaactcacggaattcggctgcgacgaggtcgtcaccggcatcgccaagaccggcgtggtcgccgttatcaacggcagcaggggtccgggccgcacgatcgcgctgcgctccgacatggatgcgctgccgatggccgagcagacgaacctgccctacgcctcgaaggtggagaacatgatgcatgcctgcggtcatgacgggcacaccgccatgctgctcgcgaccgccaagcagttggccgaaagccgcgatttcgcgggcaaggtggtactgatcttccagccggcggaggaaggcggcgcaggcgcgcgggtgatgatcgaggaaggtgtgctcgaacgcttcggcatcgaggaggtctacggcatgcacaaccagccgggcctcgatatcggctccttcgcgatccgcggcggcccgatgatggctggaggcgaccgcttcgtgattacaatcaacggcaagggcggccacgccgcctatccgcatctctcccacgacccggtggtcgccggcgcccagatgatcgtggcgctgcaggcgatcgcatcgcgcttcaccaaccccttcgatcccgtggtcgtgtcgatcacttatctcgagggcggcaatgccggcgcgctgaatgtcattccggccgcgatccgcctcggcggcaccatccgcaccatgaacaccgagactcgcaaaatggtcgaggaacggttccgcgaggtcgtctccagcaccgcgaagtccttcggctccgaagccgtgatcgactggcgccccggctatcccgtgacggtcaacgatccggtaaagacgaagctcgccgccaaggccgccgccgcggttgccggcgccgagaaggtcgataccgactggcccgcgacgatgggctcggaagatttctcctacatgctggaaaagcgtcccggcgcactgatctggctcggcaacggcgacagcgccgatctgcacaacccggcctacgatttcaacgacggcgccatcgttcacggcgtccgctactggctgtcgctggtcgatcagcgcctgaacggcgcagcgggagagtgaccggagcggcggtcacgacagcgcgaaaatcctgacctcgcggccgatgccctggagctcggccatgcgcgacacggagtgaacactgcgctcccgcagcatgtccgacacacggctgtcgtgcacgacggcctccgtggtcatgatgacgttcgggtcggcgagaccctggacgcgtgaggcgatgttgaccgtctggccgaaataatcctggcgatcgttcaggttgacggcgaggcatgatccctcatggatgccgatcttcaggagaaggtcgtcggcgccgtgctcggcgttcaggcgcagcatcgcctgacgcatccgcagagccgccgccaccgcccggtcgggggtcggaaagctcgccatcacggcgtcgcctatggtcttgaccacagcccccgtttcggcggcgacgatctcgttgaggacgcggaaatgggaccggacgagatcgaaggccgcgatgtcgccgacgcgttcgtaaagcgccgtcgagccccttagatcggtgaacaggaaggtcaggctggtgatcttcaggcgctgatcgacgtcaagcgtgtcggttctgaatatgtcgcgaaagctctggttggtcagcaagcgcttggcggtcagaaacggccgtctgcgccccagaagatcatgcaattcgtcgccggcgacacagacattcggcaccaccctgcggtccgtgtggttttcaagcgcgagcctgagcaggcccggacgcagagtaatcgtctcgcttagaacatggctccgggtgatgaccatcgacagcgactggcgctcgctcgtgggctccccctggacatcgatgaactgcgcggcatgcgtcaccgcgtcgaagatgatgacgaacttggacggcagctgcagcgagacgaaggctttttcgcccggcgccagctcgatcatctccagttgaataggcgcgaacttctcttccagatcgtcaggcagatcgacgccggaactgaaaaacatctgccggtaatattcgagcggcggcaggagatcggggtcgtgcgcggcgatgcggcgcactcgcgggttaacggtgaacgtcacctccaccatctcgtcgagcgtcggctcgtatcccgcggcgcacagcccgcagtgatagacatcatggacgacgcccttcaggcttgctccggtgtccagcaccccgccgcagcccgggcagagcacgttccaggtcatgtcgaaaatgccgagacgcgccgcatgcaggaacgcggcgatcgtccgctcctcgtcgagccgatgtccgcctgcgaaagcaagcacgttgatacggttgagatcgcgatcggcgccgcgcgcgacaacggcttcgatgcacgccgccgtctctgcgtcggccgcctgtcgcagggcggcaaaaagggcctcgacatcgctcatgtgaccattccgatacggacaatcgacaacagacatcgccaatgagctaatataatatcacggtaaaccacggaatgcatgggggagcacggcgcccatcgtatttggtcggtgccgcgactgtaagcccgcggcaccgctggaacgttacgccacccgtgtctgtttcttgaccgccaccttggcggtctccaagcgctgggcgacggcgtactggatcgccaggccgatcatgagcgtcgtgatttcgaccgccgacgagaacacatacgcctctctcagcacctgcaatacgatggcgacaagcgagccccaggcaaacacggcaaggccctgctttccaagcaaagacacggcagccagcttggcacttcccgcgatcgtgcggaacacggcgatctgcgagacgacatatgccagcgccagggcatgcatcagtcgcggcagcggcaggatgcccttttcgaaaccgaccagcagcgcgggactgtcgccccaggccgtcagctcatagttttgtccctggatgacgaacatcgaaaagccgagataggtgatcgcaaccgtcatcaggacggggctgtagccgacaaaggtctcgcccttcttggcagaaatacctgcgcacaggccgatgcagtagatcagctgccaggagaagggattgaggaaccaggacccgtcggtgggaaaattgggcaggttgatattgttccatcccgcgatggcccagatcgataccgacaccgacagcaggagaacgcggcttcgggcggcgagggcgagaaagaccggcgttgcggccaaaagcagcatgtaaagcggaagaatgttgaagtagcccagctggtgcgtcatcgtgaggacgccgagcgcggtcgtccacggcgcttccagataggacatcatgttgacgcgctccgaaagcgcggtcgtgcccaggaaatcgtggccggtcatcaggacgatgacggcaagcaccgttgtcagcaggtggacgccgtaaagccggccggcgcggcgaaggacacgcgcgaccgcgttgatgcgatcgcgggcataggcgttggaataggcgagaccggcggacatgccggacatcagcacgaaggcctcggccgcgtcggagaagccgaagttcttcgacgtgacggcttccaacatgttgccaggcacgtggttgatgaagatcatcaccagagccaggccacgaaagaaatcaaggcgcggatctcggccggccgattgagcggcagggtgctgcatggttaacttgtcccgctgattcatttctgttttcgatgaacccacggtaacaaccgccggatgaagcccacatgaacgggcggttcacctttccgacatcagcggagagatctgtgaagaaaccgctacggcgatcaggccggccagtcctccatcgcgacctcgcctgacggcatcagcctggtgcagacgaaatgcgagagcctgtcgtgccggatgacggcggcgctgaggcgaccggtccggtaggcggcggtatcgagcgcgatgcgattgtcgtagacctcggggcgcagcgaattggtgatcgtatggccgtggaccacgatgtgatcgaagggatcgacatggtcgaggaagcccgcgcgtatccatctgaggtcataatccgtctgctcggccagagcgacgcctggacggatgccggcgtggacgaaacagtagcgcccgatctgcctgtaggtcagcgcgttgtccagaagatcggcatgaccgggaaaagtgccgcgaatgtcggccgcgattcccttgaaatcgggaaccggccggctggaataggcgctgacggttgccacgccaccccagtccatccagttgacggcgtcctcgggcgcaaggtcctcgcgcagcagcgcccgcaggtaaaagtcgtgattgccgagaatcagggacgaacccggatagcggtccagcgtcgaggcgacgagatcgagcaccagcgggctgcgcggtccccggtcgatcagatcacccaggaagatcacgaccggcttcgtcgaaccttgattcgcgacgtccgcgatgtgatcgagcatggcttcgagaagatcggcacgcccgtgaatgtcggcgattgcatagatcaagggcagtgcgtcgtctgtcataatgggccgattctcccgtgcgaagctgaaccgctccgccgcatttcctgacgacaagcatctacgccatggcccgaccgctccgcaaggtgacgacgcgcagataacggcgggcggccatttcagtgaactgtcgagggcctagagatagtccagcccgatatcgagcaccggggcgctgtgcgtgatccagccgaccgacaggagatcgacgccggaagcggcgatctcggccgcggtcgccggattgatgttgcccgacgcctcggtgatcgcgcggcccgcgacaagcgccacggcctcgcgcaaatcggccggtgtcatattgtcgagaagcacggcgtcgacgccgatatccatggcatcgcggagctgatcgagcgtatcgacctccacctcgatcttgaccatgtggccaacgccggccctggcgcggcggatggcttcgccaacgccgccggcgatcgcgacatgattgtccttgatcagcaccgcgtcgtgaagcgcgaagcgatggttcatgccgccgccggcccgaacggcgtatttctccagcgccctcagccccggcgtcgtcttgcgggtgcagacgaccgacgcgcttgtggcggagaccgcctgcacgatcccagcggtgacggtggcgatgcccgagaggtggccgaggaaattgagcgcggtgcgctcgccggtcagaagcgcgcgcgacggtccttcgatggtcgcgatgacatcgccgggcttgagcgcggcgccgtcatccatgtggcgggtcatcgagacggccggatcgacgagctgaaaggacagctcggcggcatcgagaccggcgacgacgccgtgcttgcggctgaccatggcaaggcgcgaccgatggtcggcggggatgacggccgcggacgtgatgtcgccggcaaggccgagatcctcgacaagcgcattgcggacggccggctcgatgacgatgcggggaagggaagcaagcatgatggtttcactcttcaagcggtatgagcaagggattggggcgcgatgcggtgcgccgcgtcgagaatggatttgagcgtcatcctgcgtcgccgtgcatcggcaagcggcagcggataatcggtgcgcgcatgggcgccgcgagattcctcccgcaacgcggcgaagacggcgatcgaaagcgcgaccagcgccgggtcgctcgaaggtccttcctccaatgcgagcggcagcaggctggcgaccgcgcccttgatcgcgccggcattgcgcaacacgccgaggccgcgcgacacgatcgggcgaacgggcgtgagttgcgacggcaacggcagccgctcggcgacgcacggccgagggttccgcgccgatgttgcaagaatatcgcgggccgcccgcatgcccatcgccgcggcctcaagcagcgagttgctggccagccggttggcgccgtgcaggccggtcgaggccgcctcgccgacgacccacagtccgtccaccgtactacgtccttgaagatcggtcgccacgccgcccatgtgataatggaccgccgggcgcaccgggatcggctggcgcgccggatcgaccccggcctgccggcaaagccttgttattcccggaaagcggtccgggaatcgctgccccagcgcctcgcgtgcatcgagaaacacgccaccgcctttttggatctcggcgctgatggcgcgcgcgacgatatcgcgcggcgcgagttcggcgccgggctgatcggcgaggaaacgctcgcgtttctcgttgatgaggatcgcgccttccccacggaccgcctcgctgatcaggccaagggggtggccggcggaccagccggcggaattgagcgccgtcggatgaaactgcacgaactccatgtcggccagttctgccccggcgcgcgcggcaagcatgacgccctgtccgtaattgcccgttggcgtcgtggtcgcttcataaagaccaccaactccgcccgtcgccagaacgatccgcgtcgtggggatgattgcggcacccgatggcgtcgcgcacaaaaggccggccagtgcatcgtcggtcttgagcaaccgccgcacctcgacgccctcgatcacggtgatcgacggggtccggcggacccgttcgacgagcgcgctgacgatcgcagcacccgatccgtctcccgcgacatgcacgatgcggcggcgggagtgggcggcctccagcccgagcaggtaagagccatccggcccacggtcgaaagacacgccgaaggtttccagggcggcgatgacccgcgacgcgtcgcccaggatcgcggcggccgcctcggcatcgcacagtccgtcgccggccgccagcgtgtcgactagatgcaggccgacgctgtcgtcgcccccgagactggcggcaatgccgccctgcgcccaggcgctcgacgtctcggcgccgagtgccgcccgggtgagcagcacgacgggctgcggcgcaagcgtcagcgccgtcatcaatccggccagtccgctgccgaccaccgcgacatggccggcgaactgatcgaggcgctcggtcataccgccagcatcctctcgaccgcgcgccgcgcatcggcggcgatggcgggatcgaccgtcacctcgtggcgattgtcttcgagcgcctggcggatattggcgagcgtgatgcgcttcatgtgcggacacaggttgcagggacgaatgaactccacatccgggtggtcgacggcgacgttgtcgctcatcgaacattccgtcagaagcacgacgcgcgccggcttcttctcgccgacatagtccgacatcaccgccgtcgagccggcgaaatcggcttccgccacgacgtcaggcgggcattccggatgcgccagaatggtgatgccaggatgcgcctctcgcagatcgcgcacatcccgcgcgttgaagagctcgtgcacctcgcagtggccgtgccaggcgatgatctccacattcgtctcgcgcgcgacgttctgcgccagatactcgtccgggatcatcagcaccttcggcacgccgagcgactccacgacctttctggcgttgcccgacgtgcagcagatgtcggaggcggctttgacggcggccgaggtgttgacataggtgatgacgggcacacccggatgggcctggcgaagaagcgcgatatcctcaggcgtgatcgaatccgccagcgaacagcccgccgccatatccggtatcagcacggtcttttccgggttcaagagcttggcggtctcggccatgaagtgaacgccggccagcacgatcacatccgcctcgacgtcgatggccttgcgcgccagcgccaggctgtcgccgacgatatccgccacgccgtggaatatctccggcgtctggtagttatgggcgaggatcacggcattgcgccggcgcttcaactcgaggatcgcttcgacatccgcctgatgggaaagccactcggcttcaggcatgactcggcgaacgcgctcatagagcgacgacatggaaatcggcgaattcatcaacaagctccctatatactctcagtgagtatatctcgggcaaatagatattctcgattcgagtttatgtcaattgcgggagagaggaagtttcgaacccgacagtgcgcgctcctcgagcaccgcgtgccggtagcggaaaagcttggcggggcggccaccggtctcgctggccatgccacccgtttcctcgatcagttcctgctgatcgatcaggcggcggaaattcggcttgtgcagcgtgagccccgccaacgcctcgatcgtgcgctgaagctgcagcagggtgaaattctccggcatgagttcgaagacgacggggcggtatttgatcttggcgcgcagccgggcgatcccggtcgccagaatgcggcggtggtcggcgaacatcgggcgtccggtcgcgggatcggcggccgcgccggcctccttgacgatctcggcttcatacatcagttcgtagcgctgcagcgccagatcctcgttccaggcagcaccgttcagcccgaaagcgaaatcgacccggcgttgacggctttcgcggcgggagggttccattgccgtccattcgcgcagacgctcggcaatggcgacgagaacctccggccggccgtttcgatgatcttcccaagggaaatacgcgtaccatccgtgccagccaggcttgccggcgccgggcgccgcctgctcgcgaacgagaccgaggtagctgatcgagatcgttctgcgcccctcgctatctccctgaccctcgaccgacgaacggtcgcgatcggcgaaggtgtagagctgctcgagatagccgacgggatgccccgtctgatcgcccacccattcgcgcaggcctgattgcaggctgcggtgaccgagctcgaacggaccggagggcagcgcgttgccggaatcaacggtcatcacgcgtggctccgcacccgtgaccgcggtcagaacggcgatcagttcggtgtgggcatgcatggcgctcaaagacgatatccccggtgtgtgaatggtgcgccccttctctcacgacgaggcgatgcggcgcaagttcatgaggaaacgatcaccaaccagaaccaccgcgaaatttcggcaaaaataatctacaaaaatgatagaaaaagaataagcaatctttcgccagcgctgcgccctgataggctgaagccatgaactgaccgccggaacaaggacgcctgcatgcccggcatgaagcatccgcactcgtgaaaggaaatttgatgagcaacggcctgatcgtcggcttctcgggaaacatcacccgcccctccagcaccaggcgcttcgtcgacagcgtgaccgcatcgcttgccgagcgcgccggcttgacgcacgaagtgttcgatgtggaagacttcggcccggcgctggccgcggcgcgggcggttaccgacctcgatccgaaggcgcaaaccatcgtcaggaccatcatcgaggcggatgccctcgtcatcggatcgccgacctacaagggaagtttcaccggcctgttcaagcatgtgatcgatctgctcgatccagccgacctgcgcggcaagccgatcattctcacggcgaccggcggtggcgaccggcacgctttgatggtcgaacaccagcttcgtccgctgtttgctttcttcgaagccttcgtcgtcccgaccgccgtctacgcatcaagccgggacttcaccgacggagccccctcgccagccatcagcgaccgcatcgaacaagctctcgcgcaagcgaccgcgctgctgcgcggccgctcgatcccaacggcgatcgccgccgaataagagagggacttaggcggtttcccggcgcttggccggctcgacgccataggcgcggccgaagcggttggcgaggaaatcgtcgagcgagatctcttcctggcgcacgaaacccttctgaggcagctttccatccgccagcaggtcgaggaccgccgtgatgcctgccgccgtggtgatctggatcgcgctcatccgcttgtccgcgaccatgcccgcatagaccttgttggcgtaggtttcctgcaggtaccggccgtccttccagccgcagacggtcacgaagacgacgacgacgtcctgcatggtggccggcagcgcgttctcgaacagatccttcagcacgtcgcggcggttcttcaggttgagatcgtggagaagcgccttgatgatcgcctgatgaccgggatagcggatcgtcctgtagttcatcgtgcgaacgcggccctgcagcgtctccgccaatgtgccgaggccacctgatgtgttgaaggcctcgtaggtcacgccatcgagcgagaattcctcgcgctcctccatcgccggaacgttgatcagcttgccttcgacgatggcctcgcactgctcgatatattcgttgatcagcccgtccgtgctccaggtcagattatagttcagggcattggacggatattgcggcagggcgccgacccgcatgcgcacgctgtcgaggctgtcgaaccgcttcgccagatcgttggcaacgatggagatgaagcccggagccaggccgcattgcgggatgaaggccgtatcggcgccatccgccagcgtcttgaccattcgggtcgtggccacgtcttcggtgagatccagataatgaacgccggcgtccagcgccgcctgcgcgaccttgccggtcagatggaagggcgccgccgagagcaccgcgaacttacccttgagcacaccgacgagagcggcatgatcggcgatatcgaccgccgtgacggagatcgcgggatggcggtcgattttcgccagctgctgcccatccctgtcggcaacgacgacgcggtagctgccggtgtcggccagcatcagagcaatggcgccaccaattttcccggcgccgacaaccacgatgaccttcatataaatcccctgctatttgcctataggtttcttataagtgtaagcttcggctggttgattcatagcgtcgaaactgtcatttcgatgctacaatctagtcagatcgctgtataagatcgacgaattgcgaggatccgatgcaactgaccctcaaggaccgggaactgctcgcgctactcggggaaaacgcccggacgccggtcgcagcactcgccaagaagctgtcgctttcgcgaacgacggttcaggcgcggctggaacggctggagcgcgagggtgtcataaccggatatggcgtcaggctgtcggcggaatattcctccagcctgatcaacgcccatatcctgatcacaatcgcccccaaggcgctctcggaggtggtggcctcgctgggcagggttcagggcgtgacgacgctgcattcggtcagcggctcgttcgatctcatcgccatcatcgtggcgcccaccatcaccgaactcgatcacctcatcgacgagatcggcgcgatgaacggcgtcgaacgaaccttgtcctcaatcatcctatcgacgcgcataagccggtagacagcgatggaccacaggattttcctaaaaacgtggagatcctgtacaccgcgctctacgtagacagcgatagacggcagacgggccagaaacggaaatgacgagatgtatcgctcaagacgctccttcctcacggccatagctgcgagcctttccgcggcagcgctgatgccgctcgaccaggcgttcgccgggaacgggaacgggaacgggaacgggaacggcggtagcaatggtggagggaatggcaacggcaataatggcaaaggcaacggaaatggcggcccgtcgggcacgtcaccaggtcagaccggggaccgggacgccgatggccgcagtaacggtggttcaagcagcggtggctcgggtagcgatagctcgggcagcggccggacctcgcccacctcgggcgcgcaggcatcgcgaaatgccgacggctccatccgcgtgcgccaccgcaacggcatcaccgaatccgtcgccggcggccgctacgtgatcaaggatggcaagggccggacgatcagcaaccgccccgccaagccggccgacatcagccgcctggacaagtatctgccctagctctggtcacgccacttgatggcggcctcggtccggttcgtggcgccgagcttctgcaggatctgcgtcatgtgatgcttgacggtcttttcctgcaggtcgagccgcaggccgatatgcttgttggagagcccttccgccacgaggtccatgacctccttctcgcgcggcgtcagctgacccgctggcgactgggcgccgcgcagcgaattttccaccagcttcgccgacatggcctgcgagatgacgcgcgttccctgcagcgcctgacggatggcctgggccagggcgcgtgacccgacccctttcagcacgtaacccgacgcgccgcgctgcagcgcgctggagagcgtgtcgacctcctcgttggccgtcagcatcagcactttggtcccggggctgcgcgacaggatctcggcgatcgcatccagcccgccgcccggcatcgacacgtcgagcagaaggatgtcgggccggctctcggtggcgaggctgacggcgtcctcaccgctcgcgccctcaccgacgacgtcgaaatcgctgacctcggcaaggctccggctcaccccctcgcgaaacagggggtggtcatcaaccacgccaatggtgattgcggtcataatgcctcctccatttccacgggttccaggctcatggtcacgaccgtgccatcctcgcccgtagtgatttcaaaccgtccgcccagactgtcgatgcgttcgcgcagacccgcgagcccgatactggtcgggcgcacctcgctcggatcgaagccatcgccccgatcgcgcacttccaccctgaccttgccgtcgcgaagcgtggcctcgacggactgccgcacgccgccgccatggcggtaggcattgttgagcgcttcctgggtgaagcggtagatgcagcttttcagcgccgtcgaaacctccgagccgtcgctgtcgacgtccgccgccaccgtggtcccggtccgcgcctcatgcgcctcgacgacgcgctcgacgatttcggtgaacgaggcgccgtcgatctgcggcagcaccagcccgcggcagatcgtgcggatctcggccatcgcctcggcgaggctcgagcgtatccaggacagctccttttcgcgttcctcggtcgtcgtgtgggaatcggcgagcatttcgctatcgagcctgagcgacgcataggcgatatgttgcgccggcccgtcgtggagatcggcgccgacccgcctcagataactttcgttgagttccgccgcccgctgcgacgcgcgctgcaggcggcgctgcagcgcctggttttcgccgagcagttccgatagttccgcgaccttgcccttcagatcaccgcgttgcctttcgataagcctgctgccgcgaaagacgatggcggacaaggccaggaagaagatcgccgtcaacagcgcgaccgacgccatgctccaaagcctggtccgcgtcaggctgtcgccgagcccctcggcggtctcgtagaattcgaggacggcgacgggctgaccggaccagggctggaggacgggattgtagatctcgatcaacggattgccgagcttgctctccttttcgctttcggggtcggacgcctgttcgtatcgggcgaccagcgatcccgcgaaggcctggcgcagtttgtcggtgaccgggaacttgcgaccgaccagctccttctcgttggagtagaggatcgttccatcccggcgccacagcttgaaggagaccagccgcttgccgagctcgccctgcgtcagcgcttcgtcgagcgcctgggcactgccctcctccagaaggtcctcggtctgcatgtcgggaaggaccggcgccacgacgctgtcgacataaagcgcggtggtcgcgccggtatggcggatgacggcgtcctcgatcacctgcgtcaacagcatgccgatggcgaacatcgtcccgacggagagcacgcctcccgttatgaaaaactgcgcggccagagaacgggtgtgccagtgggaaagccaatgcatatgcgacctgtcgaacctatgtccgacgaagatgggaccgggctcggaaaattccagaagccgccgccatcgatatcaattcgcgacgtctcgggtgtcgatgatctgggcgcccgccacgctcttgctgatctcggcagtgccgcccgacatcgcctggccgaagaaatagagaacgccgcacaggaaaacgacgagggcgatgaccgacatgttcaccgtaacgggtatcgaagacgtctctcgactgttgctcatggcgagaactccctgtctttgctgcgaattcaatgtctttgccgacaattcaacgtgccggcgggagcagctgttcccgaccccggaccttggtctgagtgcatgccggactgaggtccgggtggcggaacagcgacttggcccgcccgttgtctgctcggcgaccaagagcggtcgttctcgaaaaggaggaagagagatgctctccaagatcattatcggcgcggcgaccgccgcgaccctcatgtcgggcgttgcctttgcccagtcttccacggtcaatggcgccgcgggcggtgccgtcacgggcgccatcgtgggcggcccagtcggtgcagccgtcggcggcgtcgccggcgcggtcgtcggcacggcgatcgatccgccgccgcgcaaggtcgtcacctacgtccagcaggccccggcgccgaccgcgcgcgtcgtcgtcaaggagaagatcgtcgtcggccaggcactgcctcagaccgtcgtggtcaccccgatccccgaggatccgaactactcctatgccatcgtgaacgacgaacgcgtgatcgtggaaccgtcgtcccgcaaggtcatccaggtgatcaactgaccggacgaccgactatgcatcggacgcggcgcggccgcgtccggccacccgcgaacaagcgcgatgaaccaccccgtcgacaaggacatgcacagatggacacagttgcgagactgacattcgcgatatcgagcgccgtcggcgcctgcattcttgccgcatcggtcgcctccgtcgtcatggccgacccctcccaaacgaccgcgatgccgaagcaggacctgtggacctctgagcccgtccgcgtcgatccgctggcgcagaattacgagcgcctgccaccggcctactcgacctacgcgatcgaggccgcagccggctttcaacaagcctcccgctagaatagacacgccaaatcccccacgccgcccgaaagcccgtggtttcaaccatgcaatcttcactcggacggggcgctggaaatcacctcgattgagtaagtaaaatatggcgctttccagcgccccgttcggcggtttatgcccgcgactccgatctctctgcctttccgcccaacttcgcggcggaaccatgtgtgcctcacaggcacgtccgggctcaactcaggcaccatctcgcgatggaacccgccgtcaccggagggagatcattttccgcggacccggaccgtgaggtttcgcgtcctaccctcacgctccgcgccgatcccgcctcgccggcacgcctgccggggtatccgatgacgggacgcctttattttagcgcgaggtttttcgagcggggaaattcgagacgtcgatttcggccaagatattgatctgcaacgctcgcaccgaccaccacatccccatgcagggacgcgcgtcgttcacgacgcggcgcgccatggctcattccgtgtgccatcgcctgcttggataaagcctggacaagccggcgtagaagcgaagggagagcgagcagcgctggaggtcttgccgatcaacggaaaacgccgcgaggcagcggcgttcgatggtgaaagctctcaaaacgcgacaggcgccggggtgaaccggcgcttgtgcgatcattcggcggaggtcaggcctcccggccgaacgccactactgaataacctggacgaccttgcgggtctgcggttcgacgatgacgcgctgctggcccacgatcacgtaaccgtagttcggatcctcgggaacgggcgtgacgacgacatcaggcggaagggccacgccgaccttgacgcgttcctggaccacgacgggctgtgccggcatcggcgcctgttcgacgtaggtgacgaccttggccggcggaggatcgatcacgccgccggcaacaccgcccacgaccgcgccgacaccggcgccgatcggaccgccgacgatggcaccggtagcggcgccaccgacagcgcccgtaaccgcgccatcggcgtaagcggaagcggccatacaggtcatcgctgctgcgagaataatgcgtttcattttcatgctccttctctcaattggtgcatgaaaaagactgttggccggcatttgttccgcctatcggacttaggtccggggcatgcggccgcaggcgcgcaggtcgcaagtgcagcaatgagatggcccacgatcaggctttgtttgccgcttccagggtggagatcagcacgcccgcggttgccaccgaggaccccgggttctgacctgtgatgagcagcccatcctgaacggcgtaggattgccaatcgtcaaccttggaatagagaccgccctcgctcttcagcatgtcctcgacgaggaagggcacgatattggtgagaccgacggcatcttcctcgctattggtgaagccggtgaccttctttccggcgacgagcggcttgccgacggctgacttcacgtggcgcaggacgccgggggcgtggcagacgaacgcgatgggcttgccggcagcatacatgctctcgatcaggccgatcgaatgcttgtcctcggccagatcccagagcgggccatgaccgcccggatagaagacggcgtcgaaatcgctttcgcgaaccgtggaaagctggaccgtgttggaaagcaccttttgcgcggcggcatcggcgttgaagcgccgggtttcggcggtctggaaatccgcttcgtcgctcttcggatcgagcggcggctggccacccttgggcgaggcgaccgtgacatcggcaccggccttgaggaaggcgtagtagggcgcggcgaactcctcgagccagaacccggtcttcttgccggtgttgccgagttcgtcatgcgaggtgagtaccatcagaatcttcatagtgatctccttgccgcgttgcgcgcagccttgaaaattgttgccggcgtgttgcgatcaacacgctttgccgacaggttgttcccgtctggacaaggaggatcatgcgcccgctccagaaatttttgaaatttatttatttgatttcagttattcacaatggattataactgaatgcaatacgacctgaatcttctgccagtcttcatggccctcttcgaggagcgcaacgtcacccgcgcagccgagcggctcgggatcacgcaacccgcgctatccaacgcactgaagcggctgcgcgagacgatgcacgatccgctcttcgtgcgcgaacgctatggcatgcagccgacgcagatggcgcaggacctcgcgccggtgatcggcgcggcattggccgcgatcgacgaggccgttcgcggccagcaggacttcgacccctcgaaggccgaccgacttttcctgatcgcgccgaacagtctggtcgaattcgtgctgatgccggcgatcgtggcgcggctcagggaaatcgcgccgggcatccggctgcgactggcgcccttcggcaacgatctcaccgaggccggcgtggtctccggaacgacggcgatggtgatcggtcggattaccgacccgcccgacaatctcgtcgtgcagcatctgatggacgacgggctcgcctgcgtggtgagggccgatcacccgctggtgggagagcggctgacgaaggcggtctatgaacagctacggcatgtgaacgtcctgccgcccgggcggctacgcgccggcctgttccgcacgctcgaggagcggggactgaagcgcgacgtggccgtgtccgtcacgcacttcctggccgtgaccgagatgatcgcggcgacggattattgcgcgacactgcctcgcctgatctgccggcatctggccgacgacaagagactgagagtggtggagccgccggtcgatcttggaaccttcccggtcgaaatggcctggcacgtccgctatcgcaacgatcccgcgcatcgctggctgcgctcgctgatcgcggacatggcgcgggaactggccaccgcgacgcggtgaccagaggcgggcgaggcgaccgggagaggctctaagcccgcaggcgccctccctcggcatcgaagaacaggcgctggctggacgacaggtcgagcgcgatcaggctgcccggctctatgtccggcccggctctctgctcgaccacgaggttctggccgtcctcgagcgcgcagtagatataccgcgtgccgccgagatattcgaagaattcgacgcgcgcggcgatcgaccggtcgccggtctcgccgatcacgatatgctccggccggatgccgatcatgaactccgtgccgcgcgcaatgctcgccggcagtccctcgtccccgaagctcttcgccgcgatctcgaagcgtccgccgccctccccgaccgccttcaggaaattcatccggggtgagccgatgaagccggcgacgaacatgttggacggattttcgtagatctcccttggtgatcccgattgctcgacctttccattcttcagaacgacgatctggtcggccagcgtcatcgcctcggtctggtcgtgcgtcacgtagatcatcgtgttgccgagctcacggtgaagcctggcgatctcgatgcgcatcgagacacgcagctccgcgtcgaggttggagagcggttcgtcgaacaggaagacatcgggctcgcgaacgatcgcgcggccaatggccacgcgctgccgctggccaccggagagctgccccggacggcggtcgagaagatggtcgatcttcaggatgccggccgcctcgtcaacacggcgcttgatctcgaccgcgtccgtcttcgccatcttcaatccgaatgcgaggttctcccgcaccgacatatgcggatagagcgcataggactggaagaccatggcgatcccgcgatcggaggggtcgagatcggtgacatcgcgccccttgatgctgatctcgccatcggtcacctcctccaggccggcgatcatcctgagcagggtcgattttccacagccggaggggccgacgaaaacgacgaaatcgccctccttgatatcgagatcgatgccgtgcacgacaggcaggctgccgtaggattttcgcacacccttgagcgatacgctcgcagtttccatcgggaccatcggcctacttcccggtctggagccagaccagcatggcgcccggctcgcggttgtcccagagatgatagggcacgagcgtgacggttgccggtacctgctcggccggacgggtgcgatagagcgagccgttccagccgcttgaatcttccctggagacgtcgagctcgaccgccaccgcgccgttcagcccttcgatcgtcttcgtccggtggccgccgagcttttgcgggacgacgaaggcgttgaggtcgtggccgttatctgtttcctcgacgcaatagatcagcggaccgcgggcgagcgcaacgcgaccgacgtcctggcggaccttcggcgaggcgtattgcgggcgaagctgcagcggaagatcgagcgcgatgacatcgcccttcttccagggccggctgagccgcgcatagccatcgacgaccgacgaggcgagatcgaccgtctcgccattcaccttcagcgaggcgccctcggcccattccgggatgcgcagcgcgatgccgaattcggccgttccgtcgacatccacgtcgatgcggatatcgccattccacggatagtcggtgtgctgggtcagcttaaccttgccgccctcgagctgcgctttgacgctgctctcgccatagaggtgaacggcgatctcgttgtccgcgaccgcgtacatgtaggagccgacggaggcgacgaggcgggcgatgttcggcgggcagcaggggcaacggtgccagacccaacggtgatgcttgccggtgctctcaagcgggttgtcgtagaagaaggtcttgccgtcgagcgccaggccggtcagtgcgccgttatagagcgcctgctccatgacatcggcatagcggcggttcggacctcggccgagcatgcggcttgcccagaagacgagcccgacggaggcgcatgtttcggcgtaggcggtgtcgttgggcaggtcgtagtaatcggtgaagccctcgttgctcgccgccgggccgatgccgccggtgacgtacatctgcttgaccgtcagatcgtcccagagcgtctccagcgcattggtcagcgtgtcgtcgtgatactcggtggcgatgtcggccatgccggaatactggtacatggcgcgcacggcgtggccgacgaccttctgctgctcgcgcacggtctcgtgcgcctggctgtattcgtaggtcttgtgcacatagtccttgggatcgcggccgccgcgaatggcctcggcggtgaagaagtggggctcgcggccgcgctcgtcgatgaagaacttcgagagatcgagatacttcttctcgcccgtcacgcgcgccatcttgaccagcgccagttccacttcctggtggccgcaatagccggggatctggccttcgccgtggccgaaaacggttatcatgtggtcggcatagcggcacatgatgtcgagaagcttgcgcttgccggtcgcctggtaataggcgacggcggcttccatgagatggccggcgcaataaagttcgtgatggtcgcgcaggttcgtccagcgcttgccgggctgcacgcgctggaaccaggcgttcatatagccatcctcctgctgcagcttttcatacatgtcgatgatggcgtcggcgcgtgcttcaagctccgcgttcggcttgcggtagagcgagtaggcgatggtctcgatcgacttgccgagatcggaatcccagaacatctgggtcgagccggtccacttctcgtcgatcgggatgacgatccccgggctcggctggttcacgtcgatcgcctggatcatgccggccttctcgcagcggtcgagcaggatcgccgccgtggaatcgcataccgcatcctgccacttgccccagaagccgtaaagctcgacatcgggaacggcgaccgggcggaactggctcttgttttgtctggtcatgattgaattctcctttgaattacttgacggcgccggccatcaggccgcgcatgtagaagcgctgcagaagcaggaagacgagcaggcaggggatgaccatgacgacgacgccggcttgcaccgcgccccaatcgatggcgcccattctggatgagcggacagcggtcatcagtaccggcagggtgaacttgtcgttgctggacaacagcaccagcgccgcgaagaactcgttccaggcattgaggaaggcgaagatcgcgacggtgacgacaccgggcagcaccagcggaaacagcacgcgggcgagcaggccgagatcgcgcgcgccatcgatgcgggcggcttcctcgatctccttgggcacggcatcgaacgcattgcgcatcatgaagacggaaaagggcagctgcagcgtgacgtagacgagcgtcagcccgagcagcgaattgttgagcccgagcttcgagagaatgatgaacagcggcgtcaggatcgactggaacgggatcatcagggtcgcgatgatcaggacgaacagcacgttcttgaacgggaaccggtagcgggaaaagccgtagccggcgagcaggctgatcgccaccgtcagcaccaccgtcgccaccgacacgatcagcgagttcagcatgtgatgccagatgccggcgccgaacgtatcgagtgccctgtaggcatcgacgctgagcccgctcatgccgctcagcggccacggcggcagcgccgtttcgctccgcgggcggaacgaggccatgagcatgaccgcgaaaggcgccaggaagaagaagacgatcgccgctcccgcgacatgatagccggcggcgcggcgcgcattgcggcgcgcgcgcagggcggtgcggccggtcatgggcgatcctccccgaccttgagcagccagagctggacgatgctgagcgccaccaggatgagcagcaacgcgatggagagcgccgcgccatagcccaggttgaacgacacgaaggactgattgaagatgtagtagacgatcgaaatcatgcggttctgcggtccacccgaggtcatgatgtagaactggtcgaaggcgaggatcgaaccggtgaccgacaggatcagcgccagcgccatggttctgcgcatcagaggcagcgtcaggtggcggaaccgctgccaggcgccggcgccatcgatgcgcgcggcttccgtcagctccgacggaatgccctgaagaccggtcagaagaatgatcatcgtgaacccggcgatcttccagacgaccatgacgatgatcgtcaggaaggcggtgtcgaaggtcgcgagcaggttgcgccggccctgtgtcaggccgagcatttcgaagaccggcgagaacaggccgctgtcgacgttggccagccatacccacagaagcgacgccgatgccaggccgatgacgacgggcaggaagatgatggtgcgatagcccgacacgaaacggcgcggcttgtccacgaagaaggcgagcgggaaggccagcgcgaagatcgcgatcgtgaccacgagcgtgtactgcgcggtgaagccgagcgatgtccagaagcgcggatcgttgaacatgcgggtatagttgccgatgccgatccagcgcggcgagcccatgagcggccagcggtgcaggctcatccagacggtgaagagcagcggcagcacgaagaacacggtcaccagggcgattgccggcgcgatataggcgacgccgcgccagctccctctccgccgtcgcctccgcttcggagagacggagatgatttcagtcgtcatctttgatctcgttcggtttgtgacatggcgagcgatcgggaggtgtcgggtcggaaccacgcggcgatcccgaccctcgagatcccgaccctcgatgttattgcgcgctgtcgaggatcgactgcatgtccgcctggccgttggcgaaggcgccatcgacgtcgtcgctgaacatggcggcattgatgaactgcgaccacgggctgttcgggctgttgatcagatcgttgaactgcagcgtatagggggtcttggcgaccttgatcgcatcggcggcgacgagcaggcgcggatcctgtcccttcaggaccttttcggcgatgtcggtgcgcgtcggcaggctgccgttcttggccatgatcgtctgtccctcctcggaatagacgaactcgaggaacttctggatctggccgacacgcggcgtgcccttggtgacgacgatgttgtcgccgccggcgaacgaggacggcttgccgtcgacgccggggatcagcgtcacaccgaagttgaggttcggatgctgcgtgatcatcgtgccgatggcgaaggcgccaaggctctgctggccgatcttgccgccgaggaacttcaggaagtccacgccattgtctgtcgcggcgctggccggaacggccccggacttgacgagcgcgcgataggcgtcgacggcctggcgcatctgcggcgtatccagtgccgcggtctttccatcgtccgacaggatgtccgcgccggcgccccagaccagcggtgcgaaggtgaagatcatgcagccgccgcaaccgccgcccgagaaatagaagccgtagtcgtcgccgccgagcttgcggatcttttccgcgttggcggtgatctcctgccacgacgtcggcgccttctcgggatcgaggccggccttcttgtagaggtccttgttccaggcgaagacggaggtctcgaccagcagcggcaggccgtagaccttgccttcataggtgccctgcttgacatgggcgggcgccaacgcgttgaaatagctgagcgacttggcgaaatccgtcatgtcctcgagctggccggccgaagcgaaggacggggtgtagatcaggtccagcgagatggcgtcgggcgcctgcccgccggcgaccgccgtgccgtacttctggaccatctggtcgttggggatctcggtgagctcgaccttgtcggtattggcggcgttgtaggcgtcgatgaccgccttgaaggcgccgccgccgctgcccgaacgcacccacatgctaatggtttccgccgatgccgccgaccccaggcacatcgacagcaatgccgttgctgcaagcattctcttatgcatgatttcctccaaatcatggggcaatcgcgccccgcctcccgttagatttcccggtctccaccacaggactggcgaacgaccagcttgcatggaagcttgcgcaggccggcttccacagaccgtccctcggcaagatccaagatcgtcagcccggccgtgcggccgagctccttcaaattcatgtcgaccgtggtcagcgccggccgcgtctggtcggcgaagatctcccagttgtcgaaaccgacgatcgaaacgtcctcgggcacgcgcacgccccgctcgcgcaaggcgtccaccacgcctctggcgatctgatcgttgccacagaagatgccgtcgggcgttggcttttcatcatcccagagcagggcgacggcttcatgaccccagccctcggtccatgtgccgtgcatgacgacggccccagcgccgacggcctggcgaaaggcatcggcacgctcgacggccgagacgaagctgtcgggacctgtcacgtggacgatccttcgacggccgaccttgcgaagcctctcgacggcgagccgggcgccgtcggcatcatcggccgtcagcaccacacttccgggcacgccctcggtgaaggcgtagacgacgggcaccggcaggccagcgagatcgaccgggagagacctgtcgatccgcttgcccgtcgcgatgatgccatccacctgcttgtccagcatggcgtcgacatggaccttggcgagttcggggtcatcctcgatcgcgcagaggaagacggaaacgccgtgatcgaccagcgcctccgatatccccgacatcagcggcagggtgaaacgaccataggtatcgttggtgagcagccccaccgtgaaacttctgttgaagagaaggctgcgcgccagcgcattcggccggaagccgacatcggcggcgatcgacttgatcttctcgcgtgtctccgacgccatccggccggtgtcgttcagcgctttcgacacggtcgaaacgctgacgcccgccgccctggcgacgtcatgaattgtgacacggctgcttcgagcgaccacgcgatttcctccctctcgcggaggtgagaaaagcgtttcccaaacataaagtcaacgtgagaaaacgttttctcatcattttcccaatttcgggcacggggtagcgcctggaccgataacaaaggtcgccgggccagcaacggcgatcattcgagccgtacattctcgccgatgaaaatccgtggcctctggggcggcgttatgtcttcgctggcgaagcggccggcatggtggagctggatttcgatggcgcgccgcgcctccatgaaaggctcgcggtcgatgatcgcgtcgacgacaccttcgtccatcaacgccacccgctccggcgtcaccgtgtgggtgatgacgcagacggactggtccttgccgatggccttcagctcctcggcgagcacgggattgcccaccgacatgttgtagacgccgcgcagcgcggggtggcggcgcagcagagcgcggaagtccttgcgaatgttctcctgctcgtagctctgaaacgtctcgaccacacggcagttcggatgcttccggcccaaggcgtcgtggaaacccgccgcgcgctggtcgtgctccagcaaccgatggagaccgacgatgacgaccacgtcgccgccggcctcccccaggaaacgccccatcagcgcgcctgccgtgcgcccttcctgaacggcgttcgatccgacataggcgatacggccggtgcccggcaggtcggaggcgacggtgacgatgggcagcttgcgcgacagctcgtccaccttcgcggtcacttcgggatcgtcgaacaggatgacgacaaggccgtcgcactcggccgcggccctcgccagcgtcctgatcgccgcgtcggccctgatctgctcgaagtaccagaaggtgacgcggatattgtaacgcttgtattgctgcgccgagcggacgaagccctcgcgcagcttgacgtaatacgagttcacgttgttctgcagcaccacgccgatccgcaggatgcgcgtcggcatcatcgtgagcgcgcggtcgacgccgagcgctctcgcggtctcgatgaccagttgctcggtcttcggcttcacgccgccacggccgttcagcacccgatcgacggtgatccggctgacgccggccgccgccgcgacgtcatccatgctcggctttctcgccacggtatcctccctcgctcccacgtccgcgagcttagagaatgatgcatttgcgtcaatattcgcgttgcgccacgccgtgtgtggacggatattttcatcctgtctggaggcgtgaagggaagcacacatcatgagctggatatcggcctgtcgtcttgacgacatcgagcaggaaggcgtcatacgcttcgaccatggcggccgcacctacgcggtctaccgctcgccggaggacgaggttttctgcaccgacggtctctgctcgcacgaggccattcacctcgccgacggcctcgtgatggattacgagatcgaatgtcccaagcattcgggcgccttcgactatcgcaccggcacgccgcgccggccgccggcctgcaagagcctcaacacctatcaggcgaagatcgaagcgggcgaagtgctgctcgcgatccccgcctgacagccagcgaacgggtcgtacggagacatccatgtcctctatcgttatcatcggcgccggcgaatgcggcggacgtgccgcgctgcagctgcgcgagcgccatttcgacggcgccatcacgctcgtcggcgcggaagcgcttcatccctacgagcggccgccgctgtcgaaaaacggtatcctcgagggtgccgggccgaaattcatcatggatgccgagggctacaaggagcgcggcatcgacgttcgcctgggtgccgacgcgatcgggatcgatcgatcgaacaagaccgtcgagctttcggacggaacgacactcacctatgacaagctgctgctggcgaccggcgcccgcccgcgtccgttccccggcatcgccgaacgctccgagcgcgtgctgacgcttcgcacccatgccgatgcgctggcgatcaggcggcatctgcatcagggtagcaggcttgcgatcgtcggcggcggcttcatcggcctcgagctcgcggccatcgcgcgcgggctgggcgccagcgtcacgctgatcgagggcctttcccgtatcctctcgcgcggcgtacccgaggatatcgcgcatgcggttgccgcgcgccacaaggcggccggcgtcgaaatcctttgcgagagccggatcgagacctttaggatcggcgccgacggcgtgtcgatcggccttgccggagggcggacgatcgatgccgatatcgcggtgatcggcatcggctcgatccccaacgtcgcgctcgcgcaagaggcggggcttgcgatcgacaacggcatcatggtcgacgaccacctcaggacctccgaccccgacattttcgcagccggcgactgctgctccttccccatccccgtttatggcggtcgccgcgtccggctcgaatcctggcgcagcgcccaggagcaggcgatgctcgcagcggccaatctcacgggcgcggacgaacggatcagcgccgtgccgtggttctggtcggatcaatacgagctgacgctgcaagtggccggccttgccgagggcgccgtcatctccgtgcggcgagaggtcggcgaaggcgccttcatcatcttccagatcggcgccgacgggcggctgctttcggcgagcggcatcggtcccggcaacggcatcgcccgcgacatccggctggcggaaatgctgatcgcctcgggcaggactgtcgatcccacggcactcatgcaggccgaggtcaagctgaaatcgctgctggcggcctgagcgcggcgcggccgatgccggggaaaatccggctccatccattcaatgacgcatgcgggaggcaagtcatggacgattcgaaattcggcaagagagacaagagagggcattggaggcccgatggcgtcctgacgcccgcgccggtcttcgtgctgccgccgaacccgttgaaattcctgaaatggctgccgaactatttctttccgtggaacgccttcttcatggtcacggcggcgatcttctggtttttcctgactcccgggaccgagacgacgcgcaccttctccgccggctggatagcgcttgtcttcgcgcgcaatctcgcggcgttcttcattttctacggcgtgatcgagcttcggctctacaagcttcgccgccagcaaagccgcttcaagtacaatccgaacttccccgccgacaagaagaacaccgccttcctcttcggctcgcaggcctatgacagcatcatccgcggcgtcggcaccggcgtcacgatctggaccgcgatcgaggtggtgacgctctgggcattttcgaacgactacgtgccgatggcgacgttcagggacaatccggtctggcttgccttgatcgtgctcttcgtacctgtgtttcacgaggcctatttcttcgcgatccaccgcgcgctgcacattcccgcactctacaggttcgtgcattcggtgcatcacaactcggtcaatccctcgccctggtcatcgcttgccatgcacccggtcgagcacctgctgttcttcggtgaggcgctgatccatctggtgatcttctcgcatccgctcgtcgccatctacaatctgcattcgctggcgcttggcgcggtcgtcggccatgtcggcttcgacaagatcgaggcgggcgaggaaggcgggctcgatactcacgcctatgcccactacctccatcacaagtatttcgaggtgaactatgccgacggcctcatccccttcgacaagtggttcggcacctggcacgacggcaccagggatggcgacgaggcgatgaacgcgcgctggcagaaaaagatggagcgcgagaacgcccgcaaggcagctcgggaaggaaaccaggcatgagacgcaggcgaaaacaccgttcgcctcccggccatctcaccaaaagttgtagatgatatcgacctcagcattcatccgtccaatcaacccggttgctaaaaaaccataattgctccacctagattgcagacaaacgcgagcagtcggaattggatcagagcttgatgcgcattaaatacggtttcctcggcattctcctggcgattgcgcccacggcctatgcgctggacatgggatcggtgcctgttctggcgccgcagaaaaaccaggagcaggcggcccagctgagctcgcagtttctgacgcgctacagctatcggcccgtcgcgctcgacgacagcctttccgtcaagatcatggatcgcttcatcaagtcgctcgatccggatcggatgatcttccgtcagtccgacatcgacaccttcatggccgacagcaccaagatcgacgacgccatcaagaaggaagacctcaagatcccgttttccatcttcaacgtctacgagcagcgcatcgtcgatcgcatgacctatgcccgcgacctgctgaagaatggtttcgatttcaccacgcaggaagactacgccctggtgcgcgacaaggagccatggccgcaatccgacgccgagagcaacgatctctggcgcaagcgggtgaaggccgactggctgcggctgaagctcggcggccagaccgaggccaccattcgcgacacgctcgacaagcgctacaagaacgcgctcgagcgcgcctacaaatacaagagcgaagacgtcttccaatcgttcatgggcgcctactcgacgtcgatcgacccgcataccgactatttcggcgccaccgcttccgccgatttcgatatttcgatgaagctctcgcttgtcggcatcggcgcggtgctgcaggaacgcgacgactacacgacgatccgcgaactcgtccccggcggcccggcgcaactctccggcaagctcgcggtcggcgaccgcatcaccggtgtcggccagggcgctgacggtccgatcaaggaagtgatgggcacgcgcctcgacgaggtcgtgcagttgatccgcggcgcgaaggattcggtcgtgcgcctggatatcctgccggccgacgccggcgcggatggcggtcgtcgcatcatcagcctggtgcgcgacaagatcagcctcgaaaagcaggccgccaagaagaccgttctcccggtcaaggacggtgacgtcacgcgcaatatcggcgtcatcacgctgccggccttctacgaggacttcgaagcgcgccgcaagggcgagaaggactacaggagcgccagccgcgacgtcgccaatctactgaccgaactcaagcaggacaatgtcgacggcgtgctgatcgacctgcgcaacaatggcggcggttcgcttgccgaagcgatcgagcttaccggtctcttcaccggcaagggtccggtcgttcagcagcgcagcgccgacggaaaggtcgaggttcaaagcgacgacctgccgacgccggcatggaccggtcccgtcggcgtattgatcaatcgcgggtctgcctcggcatcggagatcttcgccgccgccatccaggactatggccgtggcgtgatcatcggcgaaccgagcttcggcaagggaaccgtgcagaccgtggtcaatctcgacgaggtggcgcgcagcgagaagccgaaattcggcgagctgaagctcacgatcgcgcagttcttccgcgtcaacggcggcaccacgcagctgcggggcgtaacccccgacatcaacctgccgggcctctccgatccgaagaccttcggcgagaccagctacgacaacgcgcttccatgggcgcagatcaagccggcgcgctacaagccgtcgggcaacctcaaggcggaactgccgaagctgcaggcccttcacgacaagcgcgtggagagcgacccggacttccagcgccttctcgaggatgtcgccgaactgaagtcacagcgcgacaagggcgtgatctcgctgaacgaagccgagcgccgcaaggagctggccgcgcgtgaaagccggttgaaggcacgcgcgcagctggacggcgacgtcgacacaagcaatgacgacggcctgcaatccaacgagcgcagcctgacggccgacatcgcgcttgagaacgcccgcaagaaggcgaaggacgtgctgctgaacgaagccaccgccatcctgtccgacgcggctggcctgcaggcgggcgcgatcaacggaaagtcgggtcaactcggcaaggccggcggcaagtaaagtcggcgcggcggactgcccgaggattttcaacctcgggcaagcgctgcggcaagcagaccataaaaggcgctcttgtcggctccggtcagccaatgggcattggcgggccgccctgtcaccgcgttcacgtccacgatggtctggccataggcaagccccggcgcggtctcgatctccacattgacatccctgccggcgaagatctcgggcgcgagaagccatgcgatgaccgcgggatcgtgaagcgggcgcggcgcgcctgccctggcataggcctcgtaaagcctgaggaggccctttacctcggcattgatgcggttgtcggtcgcggtgaggcgctccagctcccgtgccgtgacgagaagcgtcttcgtcacgtccagcgaggcgaccaccttgcgcacgggtgctgcgaaaacgcgcgcggcggcgtgcggatccacgaagacgttgaattccgccaccgcattcatgttgccgccctgcgacgctcccgccatcatcacgatcgccttcaggcggccggcgatttcgggatgcttggcgagcgccagcgcgatgttcgtcagcggcccgagcgcgcagatcgtcaccttgccgggcggattggcgagaaccgtctcgatgatccaatcggctgcgaactccgaccgtggctcgaccgccgaaggcggcaggtcccaaccggcggtgatcgcctcgccgtggagaacgtcggcggtgacgagttcgccgacgagcggcgcggctgcgcccatgaagacaggcacatcctcgcggccggccagagccagcaccttgagcgcattcgccgccgtgcttttgacgctgatgttgccgcagaccgccgtgatgccaagcacgtccagcgcatctccgtgcgcaagggcgagcaggatcgccaacgcgtcgtcctgaccgggatcggtatcgatgatgatggattgtctcgacaccggatcagcccgcttcctgcatgttcgggatcatcacggagacgatccggttgagcgaaacgcgcccgatgacgacgccgtttccatcgacgacatcggcggcatcggcgcccgatgcggcgatcttgcgggccgcgtcctgcagcatgtcatcgcggttcaccgccacgccgtttgaagcgccgccgccagccgtcatcgccgcatccacgcggacgacgcgcccccggttgacctcctggacgaagcgccggatgtagtcgttcgcgggcgtcagcacgatttcctcgcttgtcccctgctgcacgagttcgccgtcgcggagaaccgcgatacggtcgccaagcttgagcgcttcatcgaggtcgtgcgtgatgaagatgatcgtcttgcggacttcccgttgaatttccagcaggacgtcctgcatttcgacgcggatcagcggatcgagtgcggaaaacgcctcgtccatcaacaggatcggtgcatcgacgcagagcgcgcgggcaagaccgacgcgttgctgcatgccgcccgaaagctcgttcgggtacttggcctcgaacccttccagaccgacccgcttcagccagtgcatggcgacatcgacacgccgcgccggcgcgaccctttgcagctcaagtccatacatcgcattttgaagcacggtacgatgcggaaggaggccgaacttctggaataccatcgcggtgttcttgcgacgaaacgcgatcagttgcttttcgtcgagatcaaggacattgctgccgtcgatgatgagccgccccgcggtcggttcgatcaagcgattgatgtggcggatgagagtggacttgccggagccggaaagacccatgacgacctgcaggcatcccgccggtatgtcgaggttgatgtcgcgcagaccgaggatatggccgtgcgactggatgagttcggtcttgctcatgccggcctggacctgcggcacgaaccgttccggcgactgcccgaagatcttgtagaggccttcgatcctgatggccaagcccctgctcgatggctcagtcatggctcgctcccttgtgcttctgcagacgttggccgaacgcctggctgacgcgatcgaaaatgacggctgttccgacgatcgccagtccgttgaagatgcccagcgtgaaatactggttggcgatcgccttcagcaccggttgtcccaatccctgcacaccgatcatcgccgcgatcacgaccatgccgagcgccatcatgatcgtctggttgacgccggccatgattgtcggaagcgcaagcggcagctgtaccgtgagaagcttctgccgcttcgacgaaccgaacgcgtcggcggcctcgagaatttccttgtcgacaagccggatgccgagatttgtcagccggatgatcggcggaatgctgtagatgacgacagcgatgaggcccggcacgcgcccgatgccgagaagcatcacgaccggtatcagatagacgaaactcggcatggtttgcatgacatcgaggatcggcaggatgacgcgctggacgcgatcggaacgcgccgccgcaatgccgatcggcaagccgataacgaccgccaggacactgcacacgaagatcatcgaaatggtcttcatcgtatcgtcccacatatcgaagagcccgatcaggaccagaatggagacgcaacccacgaccagtttgacgcttcggcttgcgagccacgcgagcaaggcgacaaaggcaagaacgagcggccacggcatgccgacgaggaaccgttcgcaccagctcaagctcacctggagaggatagaagagaaaatcggcggtcgatccgagcgaccgcgcgacgtcccgaaaccaggaatcgatcgcgagcttgagcgcggtcagatagcctctgtccagattcggaaatgaaagaaaccagttcacgtttcgcaccttgtctaggaagatttgggcagcacggcgccagcgcgcgtgaaccttcgatcacggcaacatgtcgacccggcaggcggggctgtatgtagaagctggtgcgtgccggcatggtgacgggccgcccggcggcgacccgatacaccccgtggccttcgtggtcagagcgccgacttcaccttctcagcaacgtccggcgagacccacttggtccagatgtcaggattttcggtgagaaaatactgcgcggcgtcttcgcccttggcctgattttcgttcatccaggcgagcaccttgttgatcgtatcggccttcaactcacgcttcttcaggtagtcgatggcgtcgccgcccgcttcggaaaacttcttcgaaacaagcgtcttgatgttgtccgatgcggtccaggcattgggcttcggatcggcgcattcggcaaccgcggtgcagcgcttccactcttccggatcgttcgcgacaccgagatcgaccttgaccatgtcatatcggccgagcagccccgtgggcgaccagtaataggcgatgatgccctgcttgcgttcgtaggcgcgcgagatcgcgctatcgaggcctgcaagcgagccgggatcgatcagatcgaacttgtagtcggccatcttgttggccttgtagagctgcgccgtcacgatcgtcgcgccccatcccggcgcgccgttgtagatgccgccgcgggaaggattttccgggttggcgaaaagctcgggattcttcagcacgccggcaagggtcgccaactgcggatccttgtcgaccatgtatttgggaacccacagaccctggttgccggcgtcggacagcggatcggaaacggcgacgatcttgccggtctccacgccttccttgtagagcgccggaacgacatcgacggcaccctcgggaatgatatccggctggcctttctcgatcatcgcggtgatcgccggcacggtgtcgcccgccaccagattggcgttgcagccgaagcccttgttcagaatgaacttgtccatggctgcaaggaattccgccgacatggagctcatatcggcaatcgtgatatcctcgcatgacgctgcttgcgcctgctgagcggcaaaaagtgagattgcgccgacggcgaccagaccaataattttcatcgcagttcctcctattaaatgcgacggaggttgcctccatggtggcgtcgatgaaggtcgacatcacgccggagaaccgcaatacctgtattgaccgcggaacctgaacaaccaacggacatctatttatcactgcttatatgtcgcgtatcgcgcaaaaaaatcacccgccgttgacctgccgggtcaattccatcagggggattgcggacgcgcctgctcgcgaagccacgtctgaaaggtctttgccgccggtgacaatggctttctgtcgctccaggcaatgcagaagccgatgggatcgacaaccgcgagatcggaaaaacgcacgagctttccctgaccgatcaagggttcgaccatcgcgttccatccgagcgccagcccctgattttccgcggcggcggcgaggaggacggtgtacttggcgaagcgctgcccgcgcagtcctttatgggcaatcgagttggactgcaggaaatcgtgccagctgggccaattgggcacgatccagtcgagatgcaggagcggaagctgccagatgagcgaggacggcacatcgcggtgcctttccgcgaacgccggtccgcaaacagggtagatcacgtcgtcgtataacggctcgctgctctcgttcggccatccgccattcgccgggcggacgaagagatcgacttcggcattgcgatagtcgcccaccttgtcgggtatcaggtagttcaccgttatattcgggaagcgacgcgagaaatccgacatgcgcgggatgagccaaagggtggcgaaggcctcggtacaggaaagtgtgacggactcttcaggcttgtcggtggtgatcgtgcggatcgtttccgaccattgagagaagctggaggagatttccgcgaagagatcctgtgcggcggcggtcagctgcacaccgtttctgtcgcggatgaaaagtcgaatgccgagctcgtcctcaagcgccttcacctggcggctgatcgcgcctttggtgacattcatctcctcggccgcgcgactgaagctcgcgagccgtgcggtcgcctcgaagaccgctaaactggtaagtggcggaagcccgtaatatttccgtacgatcttctctgtctcccaacccaggaccacaggaagatttaatgcatagcccgggattcgcaacaaccattctcgtcgcggttcggcgggatggttcttttgttctcgcgcactcgagcggacggacctcggcggcggcctgaagcaccccaaacggaccgacccgatcagaaccccacggaaccaccgaacttgggggtcgagagcttttcccggccgcaaaatctgccatcgacattgctcgcggagccgtgacggaggctttgaatatgctcgcaaaaacgttattggtcgccgcaatttatgctgcattgcgacataatctgcctcaatccccatgtttttctcgcaggtgcgagacaatcgctttcctttaaccccaccggacggaggaactcttttcctgccatccgggccagactgaggaacagagcatgggtgatctcctgaaaggtatttccagttttcgcggtgcggtttttcccgacaattccgctctctacgagaagctggcgcgcgaggggcaaagcccgcaagcgctgatgatttcctgcgcggacagccgggtcatgccggaaacgatcacgcaatcagggcccggcgaactgtttgtctgccgtaacgccggcaacatcgttccgcccttccagacgatgaacggcggcgtgtcttcggccatcgaatatgccgttgtcgcgcttggggtgcgcgacatcatcgtctgcggtcattccgactgcggcgccatgaaggggctgtgccatccggaactgctcgaaccgatgcccaacgtcgcggcctggctgaaacatagccatgccgcctattcgatcgtctgcgaggcctatccgaagacgatcgaggatagggaacgggtccgggcggtggccatggaaaacgtgctcgtgcagctcgatcacctgcgcacgcatccctcggtcgcggccaagctcgccaggaacgaggtgacgctgcatggatggttcttcgatatcgaaacaggaaacgtgctgatctacgacgggacggcatcgcgcttcatcgagatcgaggacgggcatccgctgcccgtcgccgtcaccggccgcgaggtaccacacgtcgttcccaccctggcggcaatcacggcggagtgacgagcatggcagatatcagctcccgcacatccgctccgggcggaccgaagccctcgaccgcgcttgccgatttcgcatcctcggtcgtcgtcttccttgtcgccatcccgctttgcctcggcatcgcggttgcctcgggtgtgcccgtggccatgggtctcgtgtccggcatcgtcggcggcatcgtcgtcggcctgctggccggctctcctctgcaggtctccgggcccgcggccggtctcgccgtcatcgtcttcggcttcgtcgaccgatacggcctcgccgcgctcggtcccgttctcgtggcggccggcgccttgcagattctggcaggatttctccggatcggctcgtggttcagggcaatctcgcccgccgtggtccatggaatgctggccggcatcggcatcctgatcgttctcggccagatccatgtgctgatgggctcgaagccggcggccggcggtatcgacaacgtcgccgcgatggatgaaagcgtggccgcgctcttcaatcacgcggagcccgtggcgaacgccgccagccaggccgccgcggcggtgccggccagcccgacggcgggcgataccgatgcccttcccgtctggatggccgatatcttcacgaccgaagccctcgcgctgatgatcggcgttgcatcgctgctggcaatgatcggctgggagaagctgcgtccggcccggctgaggctggtgcccggcgcgctggtcggcgtcggcttcggcacgcttctggcggtggtcttcaaccttcccatcgccagggttcaactgcccgcctcactgctcgacgggatttcggtgccggcggcggcggacttcctgcggctgacggaaccaggcatcttcgtcaccgtgctggtcatcgccgtcatcgccagcgccgaaacgctgctttcggcggccgccgtggaccgcatgcacgacggcgtccggacccgcttcaaccgggagcttttcgcccagggcgtcggcaacgggatttgcggcatgctcggcgcgttgccgattaccggcgtcatcgtccgctcgtcggccaacgtgcaggcgggggcgaagacccgtgcttccgccgtgatgcacggtgtctgggtgctggcccttgtcgcgctgctgccgcaattgctcggcgtcgtgccgctgacggcgctcgccgccgttctgctcgtcaccgggtgccggctggtcagcctgcatcacgtccgccacctcttcgatcaccacggctgggtgcccgtcggcatctggctggcgacggtggcgatgatcgtcacgcaggatctgctgatcggcgtcggcatcggcctggcattgtcgatcatggagatcgctccgcacctgcggcgccggctccgcatcgaaagccgcgaggaaaacggggcgatcgccctcaccctggacggcgcggccacctgcaaggacctgcctgccctgctcgacacgcttgaaagcctgccgtcgaaccgcaacgtgcagctcgtcggccgcgatctgcacttcgtcgatcataccagcgccgagacgatcagcgactgggtgaagcgcgaggcccgcgccggacgcaagatggagttcatccatccgcggcacggcgaccgccacaagcgcctgggccctctcttccaccgcctcgacgcggaagcgagagcctgaccaaccgacacggcgccggcggcccggttgggccgccggagggatggacaggaagaattttctgatccggcgaccatatggcggcttcgatggggcttgcttcggtatcgcgatcacggttaccacggctgcgacgaaggtgccggatcatctgaacgaccgtgaaaagcagccgcatgtggatcgcagacaatgaataagaaaaccgaccactccgctgacctccttgtgacggagaaagacggtgtggtggcaaggctcgccgtgcgcggcggggttcgtcgtccggatgccctacagggctttctgaatgcctttgcctcggcgatgctctccgccgacgcctgcccgacggcaagcttcatcgcgggaaaggtgcttcagcggacagaacgaacgggtgtcttcaatctcgaggaaacggcgcagcgcaagacgacgtttgacagcgccctgcgtcacgcccggcaatccagctcgcctcatgggcgccttgcggccgaactcgcccagctcagccgatatgtcgtctggcaaagcggccggtccggtccgttcgcgagcgtgaacttctcgaaggcccatgcgcacagcgtcctggttggtccgtcgggtatcgaaacacgcccggacattcgcatttgcttgatcctcatggaaccatacacgcggtttcccgataatgtgcaggcccgttccaaggccttcgtgcttctgagcccctccgagatttgcatcgatggcgatgcgtggctaagggctgacgccgggtcggtgttttcggtcgaggccggacaggcattcgcgatacgatgcacgtctcagccgttgctcgccatatggtgccagctcgaggaaggcttcaagtagccggcccgacgtgcccttcgaggctccacgatcgcgacgcgtgaagcgtcacatccggcttggccgagggctggccggaaggcccaccgcaagccaacccgtcggtgaccccgtcactgccattcaagcacgaccttgcccgagtttccgctccgcatgatgtcgaaaccgcgctcgaaatcctgaaccgccattcgatgggttatgacctttcggacgtccaatccgctctgcagcatcgagagcatcttgtgccaggtttcgaacatctcgcgcccgtatattcccttgatgacaagcatcttgaacacgatcctggtccagtccaccgtcgtcggcccacttgggattccgagcatcgctatcttgccgccgacaaccatgtgatcgaccatctggttgaatgccgcgggagaaccgctcatctcgagaccgacgtcgaacccctccttcatgccaagtcgccgggttacggagccgaggtcttcggccgagacatcgaccggctgtacatcggcgacctgcccggccagggagaggcgataggggttgacgtcggtgatgacgacgtggcgggcacccgcatgccgggcgacggccgccgccatgatgccgatcggcccggcgccggtgatcatgacgtcctcgcccacgagatcgaaggacagcgcggtgtggaccgcgttgcccagcggatcgaggatcgcgcccagttcgtcatcgatctcatccggcaggggaatgacgttgaaggccggcaccttgacgaactcggcgaacgctccggggatgttgaccccgatgccggcggtatcaggtgcgagatggaacttgccgccgcgcgcggcgcggctaccgaggccgatcacatgcccctctcccgaaacccgctggcccacagcaagcccgcgcacagccgatccgagctggacgatttcgcccgcgtactcgtgtccaaccaccatcggcaccgggatcgtcttggccgcccacgaatcccatgaaaatatgtggatatcggttccgcagatcccggtcttcctgacgccgatcaggacgtcgtcggggccgatctccggctccggttgatcctgaagccacaggcctggctccgccttcgcctttacaagtgctttcacgttggtttccttggatttgaagggttcagatcagcccgatcgccttgccggcgtccgcgaatatgtcaatcgcgatcgtgacatcgtcttccgttagcgccgccgacatctgcgtccgaattcgcgcctttcccttgggcacgacaggatagaagaatccggagacgtagacgccgcgctcatcgagcgcccgggtcatctcctgggcgacgggcgcttcgtggagcatgacaggtatgatcggtgtctcgcctggaatgagctcgaagccggcggcctccaggccggcgcggaaccgtgcggaatggctgcgaaggacagcacggcggtcgtcagcgccgatcgcgatctcgatcgctttcagcgaaccggcggcgacggccggtgcgagactgttggaaaacaggtagggtctggcgcgctggcgcaggaggtcgatcacgggctgatcggccgcaacatatccgcccatcgcgccaccgaggcttttgcccagtgtgccggtgagaatgtcgacgcgcggccccacgcccgtgagcgacgccgtccccatgcccttctcaccgatgtgacccgtggcatgacaatcatcgaccatcacaagcgcgccgtaacgcccggcgagctcgcagatctcaggcagtttcgcgacgtggccatccatggagaacaccccgtcggtggcgatgagcttgaaccgtgccccgtcccggtcggcctccttcagccttgtctcgagctcgtccatgtcgccattggcataacgatagcgtttggttttcgtcagacgaattccgtcgatgatcgaagcatggttcagcgcatccgagatgatggcgtcttccggcccgagcaacggctcgaacacgccgccattggcgtcgaagcaggctgcgaacaggatggcgtcgtccttttgcaggtaggccgcgatcgccttttcaagttcgcggtgaagcgtctgcgagccacagatgaagcggaccgacgccatcccgaagccgaagctgtcgagcccgtccttcgcggcggctacgatgtcgggatgattggccagtccgagatagttgttcgcgcagagattaatcgcccggcgcgtttcatctaaggaaacaacctcgatgcgccctccctggggggatgccatgaggcgttcacgtttgtagagaccgtcgctctcgatatccgcgagcacgcttttgatatggtctagaaaggtcgacatcggacactccgcctgattggagattccgatatataggatatatatttttcagtatagtggatttttatcgatagacgagcatcagcataccgcgcgcgatcttggccgacttgtttgcaatatgatgagggacatcagcgggatagcgcgcggtctcaccggatttcatgtcctttgtcgtgcctccgctggcgatctcgaagccactcgtcaaggcggtgaaatgctcgaacgcaccgggcgcatggggagcgctgtcaagaattccgccgggctggatttcgacttcgtaccactcggtgcttcccgccattcgcgcggggctcaggatcctcaaccggcagcgtccgtcgtcgcttcgtatttccggcgtatgcgccgtgctctgtatttcgatcgggcttggctcgaccggcgcggtgccgccttcgagcaaatcggcgaaatcgatcttcaaggccctcgtcaggttccagaccacggcgaaggtcggattggcctgaccgcgctcgatctgcgaaagcatcgatttcgagacccccgaaaccgcggagagttgcgcgagggtgaggtttctgctctttcgctggcgctggagcaacgggccgagttgcggtgtgttgatgttttccatggttcaggatattgcattacaggatactggatataaaacacgatttttcggctcatgtcgagtgcacggcattccgaaacctcaatccaccacggagacgttctgccggcaatcaaagcattcgcgacgctaccgggtcaagccgccgacaattgtccaggcggcgtggcgcgcggtgatctcgacatcggattgaccggcccgatatcgaaaatctttcacagtccgacgacgacagttttgccccataacgacagatttgaatggagaggtcccatgcgcgtaagcattctcggagcaggagcaattgcctttggcgttgccgcctacctgtcgaaggagggtttcagcccgaccctgtggtcaccatccggagaacgcacgcgcgcacttgcttcgggagagccgctggtcgcgacgggcgctgtcgaaaccacggccaccgtgcgcgtggccggggaatgccgggaagccgtcgaggacgccgacgtggtcatgatcgcactccctgcttatggccacaagaaggtcatcgacgcggccgtcccctacctgaaggccggaacgccggtgatcatcagttcgcacagctctttcggcgcgctttacctctcgcagcagcttgcccatcggcaggtgagcctccccatcatcgtgtggggcaccacactggtcaccggcagacagagcagccccaccagcgttcaggtggcgacggtccggcaaaagctcgacgtcgccaccctgcccgcgagcgccgccgacgaaggcttcgaactgtgcaccaaacttttcggcgaccgcttcgttcgccgggacggcctcctcgccatcgccctcagcaatctcaacccgcagaaccatctcggcatcgcgcttctcaacctgacgcgcatggagaagggcgaaacgtggagccagggcggcaatgtgacgcccgcggtggggcgcttcatcgaagcgctcgacgcggaaaggctcgcgatcgccggtcacttcggaatttcggtccgcacggtcgaggaacatttttcgctgtcgtttcatgtgccgatgggcaccgtctcggaaatgaaccaggaaatggaccgacaggggcgcggcggccttgggccgacaacaatcgaaagccgctacattctcgaggactttccattcgggatctttccgaccgcggtcctggggaagatcatcggtcggcccgcggtgcttcacgagtccggcatttcgatcatgtccgcggcctatggccgtgacctgaccgccgacaatgatcttcttccggcgctttcgatcgaaggcatgtcggcggaggatctgcaaagcatttgccgaaacggctaccaggactgaacgacaccccgtcgtcatagccgcacagtcatagacacgcgactatctagcctgtggccacagcggcgccggctgtaagcgcggagtacggcattggcttcgtactccgcgctcatcgcggcgcggagtagacccggcccgcgcaaggacgtccaaactcacttttcctcaaacggtcaagcccggcgcaggcacctgcgcgtcgggcattttcgcatgtgggtacctgcctggcgggcaaaaacggtgccgtacaccagagtgccgtttccgcttgacagatatcaaaagtgaatggaatgataccactcattcgaaaagtgcatgtaggtggttatggaaacgcgtgaccttcaaaccttccttgccgttgctgccagtggcagcatcacgaaggcggccgacctgctcggccggtcccagccatccgtcacgcgaaccattcaagacctggaaacggagctgggcttcgagttgctgcaccgcatcgggcgcagggtacagttgtccgaggaaggcgttgcgttcgaggaagaggcccgccgcctcctcatgtcgttcagcgaacttgccgcccgcgccaagacgatcgccgccggaaaggggcgaattctccagatcgtggcgacatcggccatcggcacggggctgatcccgcgtgcgatggccgagctgaaggatgtccagcttccgcacgagacgcaccttgggcagttcattccctcggtggtcgcccaggaggtgcggggcggaagggccgaactcggtttctcgagcatgcctttggatacgccagggctggacgtcctgcgcctctattccgcgcccgacgtcgcggccctgcatgaagacgatccgctcgcgaagctcgatatcgtgccgttgacggaattggcgggaaggcgcgtggcgacccttctcaaccccttgcgcttccagcttcacatcgcgcgggcgcttgccgcgcgcgggatcgaaaccggcccggtcatccggaccaacacggcatacggcgcattgcagatcgtccgccaggccggcattccggccatcatcgatccggtaaccgcctacggcatcagccagcccggcgtcatcatacggccgatcgacgaaacggtgcctttctactggggtgtcctcgcggcatcgaaaaagcctctgcgaccggtcgcgcaggcgctgatcgaagccgtcgaagccgttgccgagcgatcgatcgtcggcttcgccaagctcgacccctcggtggccgggcaattggtgaccagcaacccggtggattccaataacggaaaagacacatgacgtatgtacaaagcccctccctgcccatcggtctcgccctgctggaggagcagttggctcgggacctcgagtacctggaactgcccggcaagccctgggttccggaacgttcgagcggcggccagcccgtcagggacgtcgtcgtcatcggcgccgggatgtgcgggctcgcggcaaccgccaagatggtgctgacgggcattaccaacatcgtcgcctacgacgccgcacccgcgggtctcgaagggccgtgggaaacctttgcgcggatgcagacgctgcggtctcccaaaaccctgcacggccccgctctgggcctgccgcaactcaccttccgtgcctggttcacggcgcagtggggtacgcaggcctgggatgcgctcgacaagatccccaagggccagtggatggattacctcgtctggtatcgccgcgtcctgaatttgccgatcgtcaacggcgtgcggatgaccgcaatcaagcggtccggcgatctcatccagatcgacatcgagggcgccgaaaccggtccggtcctcacccgcagactggttctcgccaccggccgttcgggcctcggcggttttgccgtcccggatttcctgcagggtatcgaccgcacttactgggcccattccgccgacgagatcgacttcgatgcgctgagaggcaagcgggtggccgtcatcggcgccggcgcttcgtcgatggacaacgcggcgacggccctggaagccggcgcgaaatcggtcgatctcctgatccgccgaaagcagatgccgcgcatcaacaagatgacgggaatcggcagccagggcgtcgtgcatggcatgcatcaggttcccgatagctggaagtggaagttcgtggactatacgtcggcgacgcagacgccaccgccgcgctcctcgacgctgcgcgtgtcccgtcacgccaacgcccggttcctgcttgattgcggtatcctggccgtcagacaggatagcgatgggctgctcatcgaaaccacgcaaggaccgctacgctacgacttcctcgtggctgccaccggcttcttgaacgacttcaacggccgccccgaattctccgccatcgcgccgttcatccgcacatgggcggacggccgctacacgcccgacatggggccgcagcgcccgagcatggccgacgcgccggacctcggcccctctttcgaattcagggagcgggtcgccgggacctgcccgatgctggcgaacatctactgcttcaatgacgcggcgatgctgacgcacggcaaggtctccggtgacatcccggcggtgagcgccggggcggaccgcctggttcgcggcattgccgcatcactcttcgccgaagacgtggaaacacattttgccaatctcgtcgccttcgacactcccgaactgatgggagacgagtgggtggacgccacacccctgttgcggaaggagaatgcgtagtgaccgacgccatggacaagatcgcggggcttgcgcctgacgatccaatctacgccgcccggcggcttcgcccggagttcgtggagggagcggaactatgccgggtggccgtattgcatcccgcaaacggccacggcatcgacactggactgcgcctctcgcttgcctaccgcatggccgtcctcaacgccgatcaatcccttatcagggactacggcgaccagctgtcggaaatcggcgcgtcggaagagctgatggcgctcgcccgtggagcgacggaccttgccgaaccgcttgccacgatcgccaggcatgtcgacctcgtcacgctgacgccgatcgacgccgcggcgagcgacatcgcccgccttcaatcggcggggctcaccaatccgcagatcgtcgcgctctccgaactgatcgcattcgtcaatttccagacacgcgtggcctccggcctgcgactcatgaggtcggcatgatttccgcggtccgcctcaagccactcaactggcatccctatatcgacccggtcgaagtgtcggacgccacgcccgaacagctcgacgcgatgaaggtcaccccttccgcgaagaaagtatcggaatacgtccgtaccctggtgcacgatccccaaagctatgtcgccaggaccgtgctgttcaacgccatcatgtatgttccgggcggcctgccccggcccgacagggagctcggagcgctcggcgcctcgatcgtcaatggctgcaagttctgcgccgtgacccatgcgcggcgccacgcggaattgacaaggagcgacgccgtcgtgaccgcgctctatctggagcgtcccgaggccctcggcccacgcgacgcggcgatcaacgcattcgcccgccggctctcgcaggtgccatcgcaagccaacgaggaagacatcgcctcgttgcgggccgtgggcatggacgacgccgaaatcatcgatctcatccacgccgtctcgatcttcggctgggccaatcgcctgatgcatgtcctcggccatgccgatagcggaaagtagtgtttgctcgcgacttgaaacaaggacgttgacattttcaatatacaggatagcgtatccaatatcctgtatattgaaaatagtatccacgccgcgcggcctggatatcggaatggcatccgcgaggatgtttctcaaagggctgacgagaacgtccgcccgcaacaaaaaggggtctgaaatgctcgtgaaatctgggaactttgaagtcgtccgcctggttcggctgcctcgatcctaacgagacgccaacacctcataatcagaaggacacagccagatgctggaactcaagaacatcaaactgtcgtatgggaattcgcagattctgaacggcgtcaatctctcggtgaaacgcggagacgtcgtgtcgatcatcggccccagcggcaccgggaaaaccacgctgctgaagtgcatcaactacctggcgaaaccctcttccggcaccatcgcgttcgaccagatccagatggattaccagcgcgccgacaaggcctccgtgcaggcgatccggctacgcacggcgatggtcttccagcaattcaacgtgttcaagaacatgaccgttatcgccaacgtcatggacccgctgatcgtcgtgcagcgcaagtcgaaggaagaggcacgggaaatcgcgctgcgcgaactcgaacgcgtcggtctttccgccaagcgcgacagctatccctctcagctttcaggcgggcagcttcagagaaccggcatcgcacgggcgctggctgtccgtcccgatgtgatgctcttcgacgaacccacatcgtccctagaccccgaactcgtcggcgaagttctcaaggtcatcaaggacgtgacgtcctcgggcatcacctcgttgctggtgacgcacgaaatgcagttcgcgaagaacatctcgaaccggatcgtcttcatggaccgcggcattgtcgcggcagatggcagcccggccgaaatcttcgacacgccgagcaatccgcgcctggctcagttcctgagcaccgaacatacactgcagtagactgaaaactcaaccaaaaggggaactacatcatgtttgctatcaaatccacatcgcgtcgtcagttcggcctcgccatcctcggcggcgtcgccatcgccttcgccgttgccggcgcaggcaatgcacaggaggtccgcacgatcaagatcgcgacctcggctgaatccaagcctctcgcctggggcgccatcggcgtcgagccgcagggatacgagcccgatctgctgcgcgcgatcaacgccaagctgccccagtacaagttcgaaatggaaggcgtcgccgacatcgcccaggaaaccgggctcgcgaccggcaagtacgacatggcctgcggcggctactacaagtcgccggaacgggaaaagcagttctacattcccgagaaccccatgggcgccagcctcatgaagatctacagccgcaaggatagcggcatcaaggaaatgaaggaccttgtcggcaagagcatcgttccggcaaccgccggtggtggcacctacaagttcatgatgaactggcagaaggaaaacccgcaatacaagctcgaagttaccgcatcgagcgccggcatcccctaccccaatcgtctcgacgaaatccagaacggcaagttcgacgcgctcgtcctgccgtccaatctcggcgaacagaccgtcatcgacaacaagaagctcgatgtcgtggcttccgaccccgtctacagcaacaacacctacatgctgatccacaagtccgaggaaaacaaggttctctccgacgacatcaaccgcgtcctcaaggaactgcgcgacgacggcaccatggacaagctttcgcagaaatggttcggcgaagaaatggtcaagtacctcaagtaacaggctccttccctgacggcagcgatgccgtcagggctcgggctgacattgcaagaaggagtgttcatagtgaatatctcgaccatgattcccgagctgctctcggcattgccgctgacgctcgcgattaccttcaccgccctcatcgccggcttctgcctggccttgatcgcgacgacgctccgcgtgcgacgggtgttcctgatcagccatctggccgatctctacgtttcctatgcgcgaagcgtccctgtcgttcttcagttgttcgtcaccttttacgggctcccgctgttcgcggcggtgttcggcttttcggatttcttctcggcgaacgtcgcggcgatggtcgggctgagcttgtaccatggcggctacctctcggaggtcatgcggccggcctatctctcggtggagcgcggccagcatgaggcggcggatagcctgggctacagctttcggcagaaaatcttccgcatcgccggtcctcaggcggtccacatcggcctgcccggctacggcaactcgctcatctacctggtccacaacgtcgcattggtcatgtacatcggggcggccgacgtcatggcgaccgcgcacctgatcatgcagcgcgactacaaccagtaccagttcgaaacgtatctcgttctggcggtcatctactccttgatgtgcctgatcgtctggctcgtcgtccgcttcttcgagcttcgctcgtcgatgcgcgcgccggagacggccaacgccggacgcgtcaagaacgtgctcctgccaagtgtttgaccgagaaggggtatcagtaaatgtttgaaaccgacattctattacaggacacccgggaaatacttggcgcggtgcctgtcacgctcgcgatggcagcccttatcttcgtattctcgacactgatcggcagcctgttcgcgttcatcgagtacaggaagatcccggtcctgagggaagccgtgttgacctacaaggtcgccttcaagggcgtaccgatggtcatcgtgatctttctcgcctacttcggcctgcccgccggtctgcagatgctgacctcgctggtggggatcaactacaatggtcattcaatgccgaactgggtcgttctggtcgttgcgatcacgggctgtatcgcggctttccaggccgagatcatcaagggagccctgaactccttcgacaacggccaggctgacgccgcccattcgcttgggtacaccaatgcccagctgtttcgccgggtgatgtttccgcaggtggtcgtggcggcgataccggacctgacgacatcgatcatggtcatcatgaaggcgctttcgctcggatttgcgatcgaggtcgtcgacatcttcgcccagtcacagctgaccgcagccctgaacttctactatctcgaggcgttcgtcatcgcggtggtcatctacatggtcatcgcctacatcgtcacgcaggtcgccgacatgctggaacgcaaccttcgccttcgggcgtagttcgcaccgtcgccgtgcgtcttatgcccatgccggcataagacgcacgatgccgggcaaagcctcgtcacggcctgtcctcgcggcgacggcagagatgatcggatcgtcactggcgatcccgaacagacccgctatcccgtcgatcggcacccatcgggttcttcaggcgcgggccgagatgccccgaccctgccacgtaaccctcatgttttcccgcgtcttgcgattactgccactgaccatccggcagacggccgtgatacggcgtgtcccggcagtggccccacgggccgagccagtagccgggcgggcacggatttgcgggtggatagtatgcggggggcggataataaggttcgacataacgcgggcccgccagcgatgccccgatggccgcacccgacgcggcaccaagcgcgtaccagccggcgttgttccagccacgccaatggtcgataaacagcgccgctggaccggtcacgccggtgagactgccttccagcaccgaaacgtcgaacgtgagcgtcgtcccgtcgagctttggagacttgagcgtgaccaccgcatcgctgacattcgagccgcccccgagaaccgagaccgtcgcgttcggcgggtccttgtcgaaactgtcggcgccggcgccccattgactgacgatttcactggtggcgatatggccggcggcgcgggttgggcgatcggcgaagatgatggagttggcggaaacgcccgtcaggaccagcgtgttgccttccagcttcgcgccgtcggcgttgaccaccaggagtgatgctaccggcgcctgctggctgacctgtcccacggtcttccgcaacggcgcattgggtaccctggcggcatcctgcgcgattgcggctcccgcaagcagtgcgatcaagccaggcaacaatagtctgattggtttgatgcgtatcattgtcgaatcccccttgtgagttccgtcgtggatagcccgcgatcagccgccgccacggctggcggcatagtcgatgccggcatggacttcctccatggcctgcatgaccagttcggcggcgcgctccttgtgtccgcccttgttcggcgtcgcacggcgaagcgaggccaacgcagcctgcaactgacgcagcgcggcatccatgttgccttgctccgccgtggctggagacgatacgaggggcgtggcggaggccgcggccaggaccacacccgcgccagcgagcacgctcctgcgtgaaatggtgaattcggtcacgtcgtttctccgagttcgagggtcggtttgctgcgatggccgggggattagccggtatcgatcctctgccgcatcaccacttctgggtatgcgatgagaacaatgtctggctatttcgcttccgacggtcgcgagactgcaaaatcgaagcttggagcggtccaggcctcttgaactgacgtcgacttcgtgtgtcgatacggttcgtgccttcagctgaccattgaggatcagtcatgaaacttctcgcctttgccctttgcctcaccagcgcgtacctgccggcgaatctggccagggcgacgcaaagcggaacgatcgaactgcgaagcgaaacgaagatcgaacgcagacatgcgaactacgactgcgggtccgtgggcaagcttgcggtaacctacatcaacgccgatccaaactttctcgcgctcgtgcccgtgcctcagcagccgcagccgctggtgttcacatcggtcatttccggctcgggagcgcgttatgcggcggggaaatatgtctggtggaccaaaggaaattccgcgagcctgtatgacacgacactgggcgaaaatgcgccgccaaccatgacatgcaacgcgtcctgacagcctgcaatgtcggcatagggcacggacaaatccggggctcagtgaacataggttgcgagcagcgcgccgatgcgttcgaagtcacgaaggttggctgcatcggtcttgcgcagcactgttcgtatctgcgtgcggaccgtgtcgagcgagaccttgcgatctcgtgcgactatctcggccgtctgcccgcccagaagggccgccgccaccgctccctcagccgcgctcaacccgaacaattcgctgaagaggcgcggcggcgccgatcgcggctgcgagatgtcgttgatcaagacaagcaccggcgtgccgaaagcgagcgcggtcccgcacgccggcaacggggtcgcgaccaccgcaagctgacctatgcgggcgttctcgatgtcgtcgaattcgatccgaattgcgccgccactgcccccttgggcgccgccgcggacaatatcccgaaacttcgccgcctcgcctcgatcgacgagcaatcggatgcttccgtcggtgggaagcctggatagggaaatcggaaagcctttgcgtgacaacgttcggttggccgtggtgttcgcgaacagtatgttgcattcgccgtcgacaacgacggcgcttccgggcaaggcttcgaaggccgcatatgcgaggcgcgattcaagctcggatttgattagcctttggcgcatgctcagtccgcggcgcacatgcggcataagttgctcgagagcggtcctctccctgttgccgaaagcccggccatcgcgaaagaagctcatgacggtgtgatcgctgtctccgacgaggccgatcaacatgttctcccgcccattcggcctggcgaaatcctggtagaactcggatcggcgatagctttctcgatcaacgacttcatcggcgagcacgactgtctccgctcctgctgccgcgggcttcatccgcgatatggccgatcgcacggggtcgatgtgaagatagtaggtgctgtacctgtcgtcatcggcctcggatgcctgaaagacgttggtatagcggccattgcagtctcgaaagcggaacgcccctgcttcggcgtccagataccggcacagccgttggcccaagcatgaccagtcctggccgctggtggacgcatcgtaaatgtcgctgattatagaactattgtccaaatgcatgccacgccccacaatgcttgagtgcaacaagcgccaacgcccgtgaatatctgcagcaccttcgagcgaacaacccgctccgattgataaaaatcatcatccaaaacaatgaagccagggcattgtgctataccgccttggacgacatactttacgttacgtatattatactaccgtcaggttgtattgcgcaacacgcaacgacggcatatcgtcgcaaacaggaaaatagatgcgttgatacgaacgcgcggcggcggatggaggcgtgcgtatcggccactgaattgccgcacgaccttgccggaaggctagtctatgatgtgatatccgccatcgatgtagatcgtgtcgccggtgatgagccgtgccgcgtcgtgcgccaggaacgcggttgccatgccgacatcgtcgatcgataccaggctgcgcgccggcgccgtttcctgcgccttgctcaggagttcatcgaactcgggaatgccggaggcggcgcgtgtcgccagtggcccgggggaaatggcgtgcacgcgaatgcccttgggcccaagttcagcggcgatatagcggaccgaggcttccagcgccgccttggcaacgcccatgatgttgtagttcttcaccaccatctggctgccatagtaggtcatcgtgaacagcgtcccaccgtgcttcatcaggggttcggcgagatgcgccatccgaatgaacgaccagcaggaaatatccatcgtctttagaaatccgtcgtgcggcacatcgacgacgcgcccctgcaagctgtccttcggcgagaaggcgatggaatgcaccacgaaatcgagctcgccccacatctccgtgatgcgttcgaacacggcttccagttgtcccggcaccgatacatcgagcggcatgaaaatcggcgcctcgagagcctgcgcgagtggctcgacatagggcttggccttgtcgttgagataggtcacggcgacgtcggcgcccagcgcgcggaatgcccgcgcgcaaccccaggcgatcgactgatcgttggcgatgccgacaaccagcccgcgctttccttcaagaagtttagccttcaccgtcggaatcatctgcggcccttccttctatgcatatagctggggcgtgccggcgggctcggccccaccggcggcgataagcgcgaaagtgtgccgcgcgatcatcagttcctcgtcggtcgggatgacgaagaccttgaccttgctgtcgtcgctcgacaccaggagctcgccggcattgttccgctccacgtcgagcgatacgccgagccaggcgagctttctcgcgatccgttcgcgcatcgccggcgagttttcaccgatccccgccgtaaagacgaaggcgtccagcccactcaatgcggccgcgagcgcaccggcattgaggccgatgcgatgaacgaaatggtcgagcgccagtgtcgcgccggccgcttcgctatcaagcagatcgcggacgtcgttgctgatgccggagagccccttgaggccagactccttgtagagaagatcctgcagctgcctggccgacaggccgtgctgctcgagcagatagagcagcacacccggatcgatctgcccgcaccgtgtgcccatcggcagaccgtcgagcgccgtgaagcccagcgtgctctccacgcttcgcccctcgcgaagcgcgcacatcgacgcgccgctgccgagatgggcgacgatgacacggccgccggcaacatcgggcgcaacctccgccaaccgtcccgcgacatattcgtaggacaggccatgaaagccgtaacgcctaaccccctcctcgaaatagcgcgtcggtatcgcatagtgatccgccatcggatcatgaccgcgatggaaggctgtatcgaaacaggcaacctgcgccaagtcgggctggcgctccagcagcaccttgatgggcgcgagattgtttggctggtgcagcggtgcaagcggagtgtaccactccagctcccgtagcaggctgtcatcgaccttcaccgggccggcgtggttcgggccgccatggacgacccggtggccgaccgcgatcaggcgaccttcaatccgcccgtgcagccattgcccaaccaggcgcatcgccgaaggcagatccgcgacgagttcgcacggatagtcttcctgcgccagttggtcaccaccgacgttcctgatggacaggcgcggcgcggtgccgatgccttccatctttcccttgatctgccgcgccagtgtatccgcgacggcgaaaacctcgaatttcaggctggatgaaccggcattgatcaccagtatagtgtccatggcatcaaccgccctgtatcgacgccgcacggcggcgggcttgcgcaagcaatacggcgacggcgcacgaggcaaggcgcgtgcgcaccgaatccgcccgcgaggtgaggatgatcggcacacgcgcgccaaggacgaggcccgcggcatccgcccgcgccatgaaggtcaggttcttcgccagcatgttgccagcctccagattcggcacgaccaggatctcggcgtggccggcgacgggggagcggatgcccttaatcctggcagcctccggatcgatcgcattgtcgaaggcgagcgggccgtccagaacaccacccgttatctgtccacgctcggccatcttgcacagcgcggccgcctcgatcgtcgatggtatcttcgacgtgaccgtctcgacggccgaaaggatcgccacgcgcggcgtgccgagaccgatctgcgtgaagagatcgatcgcgttctgaatgatatcgcgcttggcatcgagatccggcgcgatattgatggcggcgtcggtgatgaagagcgtttccgaatggcccggaacatccatcacgaaaacatggctgatccggcgcgcggtcctgagccccgtggctgatgacgttacagcccgcaaaagctcgtccgtgtgcaggcttcccttcatcagaagatcgccgccgccttccctgatgatctccaccgccttggcggcagccgcgtcgctgtgaggggcatcgaccagttcgaacggcgagatgtcgagaccatgcgatctggcgatcccgcgtattctctcagccgggccgacaagcagcggctggatcaacccgacatcggcggcttcgacgaccgcacgcagagatgtttcatcgcaagggtgggccacgaccgtggtcatcacaggaacctgcttggccttggcgatgagccgctcgtatttctcgtgccggccgacctcgccaacgctttccaagttcgacatttgcacagctccatgctggaacactcgttcaaaccaaggttcttcaatgatcccgccggctaggtgacacgacggatggccttcaccgacgccgtctttgccggcggcgcggcggccggctcttcggaaaggtcgaaaatgccgacgatcctttgccaacgccgctcggcctcgtctgccagcgggccacgcgcatgcaggacctcccgcagcgatgacaggccttcacggcgaacccccgcgtcagacggcagcaaccgggcgatggcggcaacggccgcctcctcgtcgatcagcagcatgaagaactggtcgcggatcaaagccttgaattgcgccagcgggatcaccggcatgccgtcctcgatacgccgcatccggcggatagcggcaaacccgcgctcgtctgccgcgccattggccatggccacgtaaagcaggctgcgcgccaacccctcccgaagaccgccgcggtccattcgcgccctgagctcttctatcctgtccttgaggacgcgcgcatgcagcgcggtcttgcctgcccgccgctgcggccttgtgtccgaactgtcgatgccaacggccgcctgcaggaacggcgatccataaaccgagaggaacatcgcctcgctcagcatctccaccccttgccgccatgcgtccagccccgccacgatctggcgcgagaccgcctgctcaatcgccaggaagggattgccggcggcgaccggacgacgctcctgcgtcacctcgttcgcgagatccgcgacaggcgccatccacggattgacgtccgagaacagctcgtactgcagccgcagcggatgcatgtcgcgaagaccccggctggcccagtccggcaccatggcacgcacgacgggctgaaggaaagcgcggtaaagcgagaggttgatgtccgacactttcgcgacagtggcaaagcgcctgtcgtcagccgggccattgcatccaagcgcgcggatgtcatcgagcgttcgcgcctcgcaacgcatgatccaatcgccctcgacaaggtctccgccgatggtttcatcggtcttcgcctcgaaaatcgcctcgtacagtccgggcggcagcgcgtcgatcagatcgatattgctggagaattcgccgtgttccttgcgggcgacacttgcggaaacgaagatgccgagatggccgatcgtctcgtgcacggtgtagacgatcgtctgcccgtgcgagcgtatctcgttcacatcgtcgtagaggtccagaatccagccgagcgcttgcgccggcggcgtgacattgtctcccttcgagcagaacacgacgatcggcgcgcgaatgttgcgaagatcgatcgcctgcccattcggtgcctcgatgcgaccggcggcgagattgttgccgacaaagagttcgtccacgatgaactggatctcgtccgcgttgagactgacatggccgccccaccattgctcgaagccgagatagcgtggcgcctcggtgtcgatcttcgaatacagattatactgcttggtccagagcgtgttggccgggttctggttctcgaaattctgcacgagccacgcaccgtcaaactgcccgtggccgagatcgctcgtgagcgccgtcagccaggtgccgccaagcagccctccagagtagcgcatcggatacttgccgcgctcgcccgcccagtaggagagcggcgcgccggcgatgatgatcgagccgaagagctcgggccgcatcgcggccagcatcatgacggcccagccggcctggcagttgccgatgacgcacggcttggcgtctgcctgcggatgcagcgcgatgactttctccaggaagatcgcttcggccagtgcgatatgctcgatcgtctggcccgcgacaggctccggaaggaagccgatgaaatagcaggggtggccggccttcaaggcaacgccgatctcgctatccgccttgaaccctccgatccccggcccatgcccggcgcgcgggtcgaccacgacgaagggtcgccgcgcgtcatcgaccgtcatgccctccggcggaacgatgcggaccagcgcgtagttgacgggcttctccagcccacgtccatccaggacgacctcgggcgtgaaattgagcacatgcggcgcggcggcctgggcgtgcgcgcgatattggttgccacgctttcgcatcacgtcccaaaacagaatgccgcgctgcgcggcatccaagccgtagtcgagtgcaacggctgccggaccgatttgcgtgacgaaatccgctgtggggagataagaagaataccgcatgccaaatctcctggttcatcgcttttggcgatcattcaaagacctatgcaggtaagagattattgccgttctgcgtccgctctatgaacgcgccctgatcttgcggggcactcagctatctcgcagatgcagcataggcaggccgggccgttcaaccaacgtatcttacggtagcatacgtgcgtttttggaagatgcggcggctttgaccacgtgtctcgcctccgatcatgtctgcgcgaagcaatgatcgcccgctcccgcccgacagaagccgctgcaaggcgtccggccgcgtcaattacacgccagacaatcaaacgcattctaacatctcaagcgatgtcggaagagttttacaccaacaccggtgcgtacaaaatatcatccctacaaagtcgatagtcttactatacattcgacgcgctgaggttatcgtgaacgcagacatggagcgcaagatatgaaacgtaggacacttttccgggctgcacttgtgggagcggtctcggccttctggtcttttccttcattcgctgccgacacggtttccaagctcgtggtcgccgaccagagcgaatttgtgcgcaatctcctcgaatcaagcggccagaaacagagcctcgacttcaacatcgactttccgaacttcgccggaggacctgcaatcctcgaagcgatccgcgccggcgcgctcgacatcgcctacgtcggcgacactccccctatccaggcacgcgcgtctggaaccttgcttccaatcatcgcaaccttcactcgagaagccgcgcaatatcgcctgaccagccggcctgggctcgtgatcagaaatctgtctgaactcaagggcaaaaaggtcagctatgtcgagggctccgggcgtcaggtgttcctgatcgaagcactgaaccgcgcgggcctgaagctcacggacgtcgaactcgtcaaccttcgcgtcgccgacctccccgacgccatccggtctgggacggtcgatgtggccgttctccaggagccgcacgttacacggctggtcaaccaagtcggcgcatcgcctgtgctggaccctgaagaacgcaagctgctgccaagtacatcatatttctatgcccgtcctgacgctctggccgacccggtcaaggttgagcagatcaaaaaattcctcaatgcgtttgtccgtgctggaaaatggagcaatgagaacgagaaggcatgggcgaagtcttatttcaccgatttccagcgtgtctccaccgaagatacagacgcgatcttgaagggccagtcgccacttatcttccagacgtcggctgaagcaatcccgcatcatcaaaagctgatcgacattctctatcaagcaggctccatcaaggaacggttcgatgcgaagggctcatttgtcgagacctttgacgcgaccattgaacaggcgcgtgaaggtggaagctgatggcgaacgccgttgatagacgatatgtggcctcgggcgtggatccgcgggctaacggcgaggcgcctgcggcagttgcccgcaagtccgctcgtctggtcccggaaaagctgccgcgaggcgggcgtctgattggaccattgcttgttctgcttggctgggagctggcgtctcgcctgggttacctgtcgccctatacgcttgcggccccctcgacagcgctcaagacgggctatgaaatggtcattgacggcacgctgctgccgcaccttatggcgtcggccgcacgtgcctattcggggctgttcctcggcgtactggtgggcgtcgtccttgccctgctttccggtctgaccagggcgggcgaagccttgatcgatggcatcgtccagatcaagagagcggttccaaccttggcactcattccattggtcatcatctggctggggatcggcgaggcaatgaaggtgttcttgatcttcaccgcggtcctcgtgcctgtctacatcaacacccacgcggccctgcgcagcattgacatcgggcacgtcgaacttgcgcgcacccttggcctttctcgacttgagtttgtccgtcatgtggcactgccaggggcgttgccagggttcttcgtatcgctgcggctggcggttgcactctgttggacggccttggtcgttctggaactcgtcaacacgcagacgggtatcggctacctgatgaaccgggcgcgcgactgggggcagacggagatcatcgtggtcggcatcatcatctacgcagtgcttggccttttgtcggatgctgtcgtgcgtttcgtcgaaagacgcgccttgtcgtacaggagagcgcttggatcatgaatgctcatatccctgttcccactgctgtaacgctgcgcaacctcacgcggagcttcaaaggcaagacaattctagaccgggtatcgctcgatattccacacggacagttcgtctcactgttgggtgaatccggttcggggaagacaacgttgctgcgggcgctggcgggtctggacgatgacgcggagagccaagggcatttccaggtgcctgccagtacctcggttctgtttcaggattcgagactgctgccatggaaaacggtcatcgacaatgtgaccctcggacttcggcgaaccgatgcaaaatcggccgcgctcgagatgctcgaagcagtggggctgggtgacaaggccgacgcgtggccttcaaccctgtctggtggccagaagcagcgcgcatcgcttgcgcgctcgctgatccggtccccttccctgttgcttgccgatgagccgtttggcgcgcttgacgccttgacgcgtatccgcatgcaggaactgctgatgcgtctggtcgatcgtgagagaccgacgatcgttcttgtcacccacgacgtcgacgaagccctgcttctctccgaccgcattcttgttctgcgagatggtcgcatcgcggaagaccacgcaatttcgctgtcgcatccgcggcgatcaaaccaatccgaacttctcgatctccgcgccaggttgctcgccagctttggcgtcagcgcagacagggcctgaaaggttatatccatgccacgtcaactccacctgaacctctttcttatgtctcgtggccaccacgagggcgcatggcggcatccggggtcgaaccacaaggcgctcaccgatctggaactctacgtcgaggctgcccacattgccgaggaggccaagttcgatgccgtatttctggccgatacgcttgcggccggcaacagcagcggcctggcatcgtcgggatcgctggaaccgattgtcctgttgtccctgctggccgcgcatacaacaaagattgggctgatcggcaccgcctccactacctatagccttccctatacgttggctcgtcaattcgcgacgcttgatcacctctccaaggggcgtgcgggctggaacatcgtcacgtcttgggctcccgaagcaggtgccaattatggccttgcgcaaaacgtcgaccacggcgatcgctacaagctcgcagcggaattcgtcgaggccgtcgacgcgctctggaaaagctttccggcggatgccatcgtggacgaccgggaaaccggccgttatctcgacgcgaaccggatgcggcccgcgaactacgagggtagccactaccgaacgaagggtccactcaatgtccccggcagcccgcaaggacggcccgtgtatatccaggcaggtcagtccgacaccggccgtgcattcgccgcgcgctgggccgaggcaattttcaccgcgcatatgacgatcgatagcgcgaagtcgttctatgccgatgtcaagaacagggccgttgcctacggccggagaccggaagacatcgtggtcttgcctggcatcagcgcggcgatcggttcgagcgagctggaagccaaacaggtttgggaagagctcgacgccctgacgagcacggaagttggcttgacgagactgtcggctcgcttcggcggacatgacttcagcaacattgcgcttgatcgtccgctcaccaaggatgattttcctgatcccaatgaggtcgaggcatcgagaagccgggtggtgggctacgtagagatgacgctccgcgaaaaactcacgcttcggcagttgcttcgcaggctggcgggcgctcgcggccatctggcggttgccggtaccccagagcaaatcgcggacctgatccaggaatggtttcagtcgggcggggcagatgggttcaatgtgatgccgccaattatcaacagtcagctgaagctgttcgccgacgaggttgtaccaattctgcaaaaacgcggtctcttcagatcggcctatggaggcgataccctgagatcccattttggattggccgaggtcggtgcggacgcgtcgtttgcgcggtctgcctgagctcgcaaggcccctctcccgtgccaactggccgacaaatctcgttttttagcgcatcggcgtgatctacgacggtgccaacgtcagcctgacgaggaatatatgtcggtgaaattggctcgcagccgcccaagcgacgggccgtgagattatcggccctgtcatcctcctgaaacatgctttcgctacgccgccccatcctcctcagtccgccgagggctgaccattgcaaaggggcatcggatgcagtttcagctcgatcgcgatggcgcccagtctcttgccgaacagatttgcaagtccatcgaggcgcgcatcctggccggcacctacggaccgggggaacgcttgccctcgacgcgccagctggcccacgaaatcggggtttcacgcagcacggtttcggaggcattcgacatgctgatggccgagggcctcatcctcggcgttaccgggtccggcacattcgtcaattccgtgcgctatctcgaacaacggcgaaacctgccgaaaaacgccacgccgatcgcggagctgcccgccgcgccgcgctccgtcgtcaatgcgctgtcctgggggccgacgctcgactatttccctttcgccgtctggcagcggatcgggacggagcaggcggcccgtgttcgcgagctgatgaacgaaggcgatccggccgggttcgcacctttgaggatgcagatcgccggctatctgaaacgtcgccgcgggatcgtctgccaccccgaccagatcatcgttacctccggcatgacccaaggtctcgatctcgtcgcccgcacgcttctgcgcagcggcgatatcgcgctgatggaggacccggcggagctgcgcgtgcgcaccacgctgacgctcgccggcgccagggtgcaggcgcttccggtcgatgacgaagggctccggatcgagctggcttcgccgcagttccggctggttcatctgtcgcctgtccggcagtttccgtccggcgcgatcctgagcgatgcccgcgagcaggcgatccgccgccatgtcgagacaaacggcgctcatatcgtggagatggacaatacggcgctcttgacggaaccccgggcgccgatcttcgccgaccagtcgagccgcgaccggacgatctatctgtcgaccttgagctggacgatgttccggtctctgcgtatcggctacatcgttgccgagccggctatgatcgaccggctgatcgccacccgcgcagccatggattttcggccgccgctgatcgagcaatacatgctggaacagttcatgcgcgaggggcatctggaacactatatcgaccggatgcgtgcggtgctctcggtgcgccggcaatcgcttgtcggctcgtggccggccggactgccggccggggtgtcgctttcgcccgagccgggcgggctcggccacatgctgaccctccccgacggaaccgacgtcgaaaggctgctgcgccaggcggcggcgcgcgggctggaaccgcgcgacatctcctcctggttcgccgatccggcacgccgcgccctgctgctcggctttgcttatgccggcgagttcaccaccatcaggggcatgcgcgatctcgccgacattctcggttcatgaccccacggcagccgccgtcgcctctctgcgcatttcgtgaaaattgccgtgcggttgaggccggcgccgcgccgcctgtgcggcctcgatctcaaaagcgaagcgctgccgcccgaccgagcgcggcagccaagccaattgtcgcataaggcggcctctgcctgggtttgtgacaagtggcccggtgatcccagcaaagtggccctgtttcacaacccttgcccgatcctagaacgggcaggacggagaaaccttctcccgaagcgacaggaaattcccatgcccccactccgtacccagatcgtcggaagttacgtcaagcccgcatggctggtgcgtcacggccatgagcaccaccacaacggcagctggtggcgcccagaagccgatgtgctgcaacaggcgcaggacgacgtggttctgctggcgatccacgagcaggagcgcgccgggctcgacgtcgtcacggatggcgagatccgccgccagcattacgaccggcattttgtctccggcatcggcggcatcagtctcgagaaggtgcaggacaaggaattccaaagcgaactcaagagcaagaccgcccgcaccgatctcggcgacctctggcagaattttcggatgtcgccgacgatcaccggtccgctggaatgggtttcctcgcctgcgatcgatgaactgcggtttgtgaagaagcacgcaaggcgcccggtcaaggcaccgatcgttggcccgatgacgctctacgatcggctggcggacgactattaccagcgccccgaagacgccatcatggcgctggcaggcgtactgaaccgcgagttgaaggaactgcaagcggaagggaccgacctcctgatggtcgccgaccccgcgctgcatttcaagctcagccgttcgcgcgagatcggcaagcccgtcatcgaacggctgctcgaaggcataaccacgcccgtcgtcctgcatgtctgttacggatatgcgaaatattcgtcctcgaagacgatcaacccttcctatcccgaggtcttgcggcttctctcggaaacgtcggtccaggcgatgagcatcgaatacgagcagcccggacatacgcccgatctcttgaagcaagccggcgacaaacatgtccatctcggcctgatcggcatgggatcgcatgaaatcgagacgccggaacatattgccggacgcttgcgcgaagcgctgaaaatcgtaccgccggagcggcttcacccctcgaccgattgcggtatgtggttcctgccgcgcgatgtcgcccgcgcaaagattgaggcgctggtcaagggcaccaatatcgtgcgccgcgaactcgggctcgacattcccgaccacgccatccgctgacctctgctttaccgatctcccgcgcaaaggacgagacccatgatccgagccccattctccttcgaaccgacccgccgcgacctcctgaaaggcatcggcgcgagtgccgccgccgccgtgatcggtggtgccgcgccggccgccgcgcagaccaatccctatgacgggctcaagggggaggaactggaactcctcatctgggatgggggcgccttcgtcgacaacatgatggcaagcgtgcagcagaaatggacatccgtcggtggcggaacgctgaagttccgcaaggttccgtttggcgatctcgatcgcgcggtgcgctccgccaaccagggcggccccggcccggatgtttttctggccaatgcgccgaacgtcataacctacaagaaactcggcctcatcgaaccggtcaccgacatgttcagcaaggacgatctggaggacttcttcccgacggtcaggctcggcagcgagatcgacggcgaattctacggcccctccaccaacgagaacggccaggctctgtactacgaccgcaagctcaccgaccgctatggcctgaaactgccggaaaccttggccgacgcgtggaaatgggacgaatggcttcgcgtcttcaccgagatccaggccgccgagcgcaaaagacgtggcaacgaccagtttttcgcgctttaccccaacatgggtaataccggcctgtttttctcgggcatctatccgcgcggcgccggcgaaaaaggctccaacgcctggaaaatggtgagtgacgacgggttgaagagcaccggttacctgaattcgacggaggcgctgcaaggcctgcagctgatccaggacattcaccacaaacacggcatcgcgcccgtatccacgcagaaggacatgttctacaacgatcaggtcgcgttcttctgcggcgtgccgctttacctcgcaccgatcaaaaaggcgcggccggatatcgatctggccaccgcgccggtgccttatctcaagacaccgatcatccacaccggctcgtttgcctggctggtcaaccgccagaccgcgaggatgggtgatgcaaagcttttcgtgaaattcatgggctcgcccgagggcaatgacatcgtcgcgcgtggctggacctcaccgccgatccgtaagtcgatggtcgccgcccggccggaattccagacgaagccgatgtcgctgtttatcgacagcatcaccgaatggtccgtgccgcgtcccaaggttcccggcttttccgagctcgacacgatgtggatacggctggaagccgatattgtcagcggcggcaatgtgaaggcgcttgccgacgatgccgcgcggcgcatcgatgcccagcttcggcgctatgcctgacggacctcgcggaccacatgccgaattccctcgccgcttccaggccacgcttctccaggcatcgcaggctccctgccctcctcgaaggatgggggccggcgcttgtctttctggcccctgcccttgtcatgctgtgccttttcaaggtctggccgatcgccgaggcgatctatacgagcaccggcacgttcgatcccggcggccagcacatcggcaccgcgggcttcgacaatttcagccttgcgctttccgacagtcgctaccggtgggggctgtggctcagcctgttcgcggcgatcgccaaggttccggttcagctcgtgctcgggcttggcgcggcactgatgctgcgcgccaataccggcgggaatgccttcgtgcgcgcgatgataatctcaccgatgttcttcggcctgccggtgaccaccttcatcttcgcctatatgttcgacgccaatgtcggggtggtgaacgccatcctctcgggaatgggcgtagcgcgcgtctcctggctctccagcgagatgccggcgcagttcctcgtgctcggactttctgtctggcgcgacgtcggcgtgaccatgctggtctttctcgccgggctttccgccattccgccgcagatcgccgccgccgcgaaactcgacggcgcggggccggtggcgctgttgttgaccatcacgctgccgctattggccagaagcttccaattcgccgtcgttctggcgaccctcgcctcgttccagatcctggttccggtcctgatgctgaccaagggcggcccgaccggcgccaccgatctcgccagtttccagatctacgagacagccttcagctatttcgatctcgggacggcaagcgccatgtcgatcgtcgttctcctcgggctcatcgccatcatcacgctggagctgcgctggctggccgtgaaatggacttacgaatgagccgttcgcttggaattgtcctgcgtgttctgctggccgcggtctttgtgctgccgatcctcttcgcggtcaccgcctcgcttcgggaaaacagcgacatgtaccggtatgccggcagcctgtcgctctgggccttcttgccggcggaaccaaccttcgacgcctatcgccgcgcgctcggccttccccgcctgcaggcccagctcttcaacaccgtgcttctgggcttcgtgatggcgacgggtacgacaatctccagcctgctcgccggttacgcgctgtcccggttccggtttcgcggccgcagggcgctgttcctggtgatgctgttcacgttgttcattcctgtcgatgtcatcctcccgcctctgttcttcgtcgttcgcgatctcgggctgatcgacagcttctgggggctcgccctgcccttcatcttttcgccgataggcgtttacctgatccgccaggcgatcgaggaagtcccgcgcgaactcgaccatgccgccgccctcgacggcgccggcctgtgggaagtgcttcgcaccgcgatcctgccgaatatccgcggagcgctgatcgcctgctggctgatgcatttcgtgttcgtctgggaatggtatctctggccgctcatcgccatgcgccgcgacgacgggcaactcgcccaggtggcgatctccggcctgatcgatcccttgcgctcgaccgattacgcactggtcttcgcggcggccatcctaaccatcgtcccggccttcgttatattcgccatcctgcagcgcttcctgacgccgagccaggcgacatcaggcggaaagtgatcctcatgcacaaactcgtcctccggtccgtctccaagggttatgcgaagggtacggccgtgctcaagcctttcgatctcgtcgcccagagcggcgagctgatcgtgctcgtcggcccgtccggctgcggcaagtcgaccttgctgaaactgatcgccgggctggagaaggtcgacggcggccagatcctgctcggcgagcgcgacattaccgacgtcgagccgcgccaccgcaggatcgccatggtgtttcagaattacgcgctctatccgcacctgaccgtgcgcgaaaacctcgcttatccgctgcgccggcagaagatgcgagccgccgaaatcgacgacaaggttatcgaggtggccaatcagctgcgcctggaagagcttctcgatcggcgcccctcgcagctctccggcggccagaagcagcgcgtcgccatggggcgggcgatcatccgcgagccggatctattcctgctcgacgagccgctttccaatctcgatgcggcgctcagaacccatgtgcgcggcgaaatccgcgatcttcagcggcgactgggcacgacgatgatctatgtcacccacgatcaggttgaggcgcaaacgctggcggaccgcgtggtcatcctgcgcgatggcgaggtgcagcagatcggcccgccgcgcgaaatctacctacgtccggccaacatattcgcagccgcctttctcggcgccgccccgccgaatttcctcaccggcagggtgaccgcgaaccgactggaaatgggcggcgcctgcgtgtcgctggccgaccttcccggcgaatgccggaccgcgcttgcgggccgcgagcagatctatgccggattgcggccggaagcgctctaccgcgtcaccgacgcaaggcagagcgttttcagactgacgggccatgtcgtcaggcgcgagatcatcggcaacagtcagcatgtctatttccgcagcgaggccgactcgcccgacatgacgagaatagccgcactggccggccggcatatgaccgacgaattcgtctggacgaccgaaaacctcgatacggacgacacgctcgaactcggcatccgtctcgacgatatcctgttcttcgatgccgacggacatgccatcggcacccatggcggcgacagcctctaacctattatcgtcacggctgccgggcgcgcgaccgaatgacggcgagcggccgtgggtctgcggcagtgtcaggaaagacgggccttcaggcgcgacgcctgtgcttcgtccacgccaagcaggcgcagataatccgggacgctgccgtagtgcaggcggatgtggtcgagcgcctgtcgcatgctccttggttcggaggcgagcacgatatcgatcagggtggaagacatgcctcggtcgagtgcgcgctggcgcagcctggcgatcagcgggccggaaatcgttgcggtcaacgcgtagtcctcgataatcgtcgtctcgtcgacgcccgcattcgccagcagcagggcggcaatgacacctgtccggtccttgccggcgctgcagtggaagagcacggcgccttccggcgcttcggcgataatgttcagcacttcggcgatcgccggccggcatttgtcgatcgcctggcaatagcggtcgcccatgtcgaagctgaggcttgcttcggccatcatctcgaccggggcgagcgccgaaaataccggcgtgttgtgataacgcacacggtcatgaccgacgaaggggttggcctgcgcggcgatctcatgcgcattgcgcaggtcgatgaccgttgcaaggccatggccgagcaacgcttcgatgtcggccgcgctcagatcatgcagggcgtcgccgcgcaatatggagcgccagcgggtcgagttgccgccggcggtccggtagccgccgagatcacggacattgtgtgcgccttcgagagcgatcagtcggttatagatgaacattttcagcggattccggatttcatgaaggattcgatgacgtggcgctgcaagacgaggtagatgatcaggatcggcaggctggcgagcgccgcggccgccatcagcggcccccagagattgccctcctgggtcatgaacatctgcaggccgatctggacgacggagttttccggcttgcgggagaggagcagcggccagaaatattcgttccaggcggagatgaaggcgatgatcgacagcgaggcgatcggagcccccatgttcggcgcgacgatctgccagaggatcttccagctcctcgccccgtctatgcgcgccgcttcgacgatctcggtcggaaaggagcgcatggcgtgatagagcaaaaggaccgcgaaagcgtggctggcattcggcaggatgaggccggtcagcgtgtcgagcagcccgagacgtgacgcaagcacgtagttcgggatcatcgtgacctggaaaggaacgagccaggagagcgcgatcaggccgtggatgacgccggaaagccgcatccgccagcgcaccagcgcgtaagccgcgaacaggccggtcaccacctgcagcgccgccgtcgccgccgcgacgaccgtggtgttgaacagcatctgcagcatcgggatgcgggtcagcacgaaaacgtagttctcgagcgtcggattggccggccatacggccgtcgagaagatttcgttttccggcctgagcgacgtgacgatcatccagtagatcgggaagatcgacaggaacgagagcaggatcatcaccgcatgcacggcgacgcggcggacctttccggtcttcccgttcagcgagacgagcggctgatgatcgtgtgaagcttcaattgtcatagaccgcgaaccttttggtcagccacatgcagcccgcggcgagaatggcgaagccgaggaagacgatcatgccggctgccgaactccagccggcggacatggtctcgaagccgtattcccagagcaggtagaagatgttggtggtggatttcagcgggccgccattggtcagcacgttgatataggcaaaactccactgcgccccgaacaggatggtcatcatcgacagcagcaggatggtgggcgaaagcaacggcaggcggatatcgcggatgatcccccagcggctcgcgccgtcgatgcgcgccgcctcgatgtaggaagggttgatgccggcattggcggctgaaaaaagcagcgtcgaaaagccgatcagcttccagccggtgatccaggtcagtgtcgccagcgcgtagttcggatcggtgaggaagccgatgcggccaaagcccaattgttccaggccaagcatgatcagaccctggtcctcgttcagaagccagcgccagagaatggccgcgacgaccggcgcgacgatcatcggcacgaagatcaggccgcgatagatcatccgggcgcggccggtgaggtcctgcgtccagatcgccacgaagagcgggatgatcaccgacatggggaagaggccgaggatgtagtagagcgtattccagagcgcgttgcgcatgtccggcagcgccatcaggcgctcgtaattcttcagtcccacatagcgcggcgtggcgctgggcagcatgttccattgatagaaggacagctggaaggtctcgaccagcgggatataggtccagacgaacagcagaacgagcgccggggtgagatagagccagggcgaaatagtgaagggctcgcgctggcggcgggctcttgccggcgcgcgggcgatcgtcatgggtctggcgaaatcggcctgaatatcggtcatcggggtccatccggatggtcttcggatgccgggcgaaacacgcgtgcccgcccggcattctttcctcgtgatgtcaggcctgcggaaaacgccgcgtcaccgacaggccgtctctacggtcaggggctgtcgccactcagggcatcagatcctgagcctgttcctgcgctgtcttgagcgtggcgatcgggtcgccattgccgaagacggcttcacggaccgagtccatcatcatcttctcgacctgacggtagttcgaaccggggaaggccatgttggcggtgatgcgatccagctgttccaggttggagcggaacatcgggttttccttcagccacggtcccagctggttgggatcgtcgacgatgtcgaggcgtagcggcaggtaaccgatcttgctggtgatgatcgtataggcttctcggctggtcaggtacttcaggagttcataagaagcgcgctgcttgaccggatccttgctgaagacgaaaagcgcgctgccggaatttgtcggcgccgtcggcttgtcgccgaaggacggcatgggtgcgagcctcaggtcaaatttgccggcggccgatttcttgacgctggagagaagcgcactcgtatagaggaacatgcccatgttgccggccgcgaacgtatcggaggcgctggcgggatcgatcttggcatgggcgccgctggtcaccatgtcgcgcagggtcttgacggcttcagccgcgttttcatcggcgaaggtcagtgtattgccgtcgcgcaccttgccgccgttcgacatgacgatcgcctggtagacgaacgtgccgtccgtcgggccgtaggcgcccgggaagaagccgttcttgccggtcttttccttgatcgccttgccggcggccgcgacgtcggcccaggtcttcggcggagcgttcggatcgaggccggcctgcttgaagagatcggcattgtagaacatgatcggcgtcgagaaggtataggcgagaccgtaggtcttgccatcgaccttgccgagttcgagacccttcgggatcatgcccgaaaattggtccttcagttccgcctccgggaccatgtcctcgagtgcgttgccgccgagatcgctggcgataaaaatcaggtcgcggaagacgagctgggccacatcaggctgtttgccggcgacgatatcggcctgcacgcgggtgatgatttcgttggagggaacggcgatcggctcgaccttgacgttcggaaacttcttctcgaacccggcgatcagttccttcgtcgcttcctggccaacgccggcggaggcgaggttgtaattgtagaaggtgatcgtcaccggcttgtcgatggttgccggcatttcggcgaaagcgccgaagggcagcatcgaggcggcggtcagcgtcgccatcagcttgagagtggttctgcgcagcatgttgcgggtctccggaagtgagattattcggcggcaacgggcattgcccgggccatcagaagttcgagcggataggtattgagttcggcgcgatcggacggcagcggcacgaaggccatggtcaggccggacggacggatggtgccgatgccgaaggaggcgccgcgcaccatccgcaggatgtcggtgcgcaggatgtcggtggcggcgtgctggccggtgccgacgacgacaggaatgccatgccagaccgagacgcgatcatgatggatatggccgctgaggatgccgatgacgttgcggcccttcagcagttcgcggaaacgttcggactgcgggaagtggatggtgcgccagtgggtcgcatcggcctcttcgccgagtgccggcggatggtggacgacgatcagcttcggcagctccagatgcttgtcgagcgttggcgcgagccagtcgaactgctccggatcgatcgtgccaccgatgaggccgggcgtcgtggaatcgatcgtgacgatatggatgccgtcgatgatcgtgtcgtgatcgtaaggcgcatccggatcggccgattcgacagccatgccttcgtagaagcccgggcgggtatcgtggttgccgagcgcatagacgatcggcacgtcgatcttggcgtccatgatctccttcagccgccggaagctttccgcatcgccgcggttcgtcaggtcgccgctggcgatgacgaattgcggcttcggcgtgacggttgcgacgagatcgagcacctgatgcagcgtctctgtcgtgtccgaatgcagatggctgtcatcggcggtgccgatatgcaggtcggtaagatggatgaaggtggtttcgcggcgcatcggatgcctcctgaatggcagtttcgtcaggaggatcgataggagcggtttgtttcccggtcgtgacggatttcgaatgccgttcgaattgtggaagacaggtcagatcggcttgcgaaacatcggcgcgatcacctccgtcatccgggctatgaccagctcgggatcgtcgagatccatgctgaagttggtgagaagctcggtcctcgaccgcgaacgcgtcacctgcgagcggatgccgagcgcgcaattgaggcgccagccgatttccacgtcgtcgagccagggcgcgatccgtttcaggtgcgggataaaggcgcgatggtgctcgacgttgccggtgatccggcggtgatgcggcgcttcctcgcggtgcgttttcaccatcgaggtgaaatgtgacagcacggcatagctcgaactgggatcgaggctccagcggatggaaggaccgacaagagccgcgatgatctccgccagatcggcgggctctggcgcgcgacgatcgacggccttccgaagcaggctgagacgttcggcgttcagccggcgatagacgcgctcggccacagcggaaatcagcgcttcctgcgatccgaagtgatagacaatcgcggatggcgtcgcatgcgcctcgatggcgatgcgccgcgccgtcagatcgtccaccgtttcggattcgcagagcagatgctcgcaggcatccatcagccttatggcagtaagattggcgcgaccgtgcatgcgtcactccccgattggcacaattctatgcccggttcgtgtacgatgcatgacaacttgaacgccgcgccctctccttcacaggctgtcaacaatcccgcacttgctggcccaaccgctgcagcagcttgaaagcgtcgtatcttttccgatgaatatcggccgtcgagcccgctcccggcgtgaacgttccgtcgacgatggtcagcatggtcatcgcttcgcggacatcgcggtaactgccgctggcgacggcgccaaggatcgccgcgcccaacaagaccggttcatcagccgacgttgcgacgaggggcttgccacaggcgtccgccaggagctgacggacaaagtcttgctgcccggccccgccgctgatgacgacggtatcgatctcgacgcccgcctccgcctgcgcgtcgatgatctgccggaggccgtaaccgatgccatagagccccgccacatagagccggacgaggctgtcgctatcgcgctccatgccgaggcctgcgatgagcgcgcgggcatgcggatcggcaagaggcgcacggttgcccaggaactcggggacgacgtggagacctgtgacgagcgagatcgcgtcggcccccgccgcgtcggcggcgaggtcggcaagcatgacgggaagcggttggcccttgtcttttgcgatccgtgtcgcttcggcggcggctggatgaaatgagagaagctgttcgatcgccgcgccggcagcactctgcccgccttcgttgagccagagccccggaaccatcgccgaatagtaaggcccccaaacgccctgcacgaaagccggctcgacggtcgatgtcatcgtgcaggacgaagtgccgaagacgtagccgagattggccgtcggcccgccgccgaagccgaccgtcccgatcccgccggcatgcgcatcgatcaatccggcggcaaccgccgtccccggcaacagcccgagttctgtcgctgcaaccgacgtcaggccgccgccaagcgccgagcccggctcgacgatcgtctggccgatgcgggcaaacccttctttcgccagtgagccgaggccgatctcttcgaaatatgtcgggtcccagcgctgctcatgggcgagataggtccatttacaggttaccgtgcaggtggatcgcgacaggtcgccggtggcgcgccaggtcaggaagtcggcaagatcgaagaactgccaggcggcggcgaacacctcgggccggttctccttcagccatagcagcttgggcgtctccatctccggagagatgcggccgccgacatagcgcagcaccgcgtggccaagggcattgatccgctccgcctgggaaaccgccctgtgatccatccagacgatgatgttgcgctccgggtcctcggatgggccgacgggcaagggcttgccctgatcaccgaggacgaccagcgagcaggtggcgtcgaagcccaatccgacgatcgcctccggggtcaccccggcatcggaaatggactgacgcaccgcctcgcagaccgcccgccagatttcgttgctcgactgttcgacgatcgatcccacctcgcggtaaagcgagatgtcgcgcttggcggaggccagcatccgtccgtcaagatcgaacactcccgcgcgcgcgcttccggtgccgacgtcaacgccgatcacgtagcgcggtgtttggacttcgtcgctcatggtctctcatctttctggcatgaatggctgacgcccgcgcaccgcgcggacctcactgtatctagaggtcgacgctgttggggaggatcaccaggtcgcggatggtgacgttgcgcggccgcgacagcatgaagagcacgcagtcggcgacttccttgggctgcatcaggcttccattggcgagcgcctcttccatcttcgccttcggccagtcatcgagcagcgcggtgacgacaggacccggcaggacggcgccaatgcgcacgccgtgctgcgcgacctggcggcgcgtcgaatgcacgaaggcctgcaccgcgaatttcgacgcggtgtagatcggctcccagaccacggggacgacgccggcgatcgagctggtgaacaggatgtcgcccgacttctgggcaatcatgtgcggcagcacggcatgcacggagcggaaggcggcgttgatgttgaggttgagcatccgatcccaggcatccggatcgccttccgcgaccggcccgccaatatacgcgccggcattggcgtggaagatgtcgagcctgccggcgatctccagaatccggggaagaattcccgagagttgcttgccgtctagcagatcgacgacgagagggaatgcacgctcgccgaactccgcgcagatttcatccagtctgtccttggcgcgatcgatgagcacgacggtcgcaccttcggcgtgcaatgtgcgggcgcattcgaggccgatgccggaggccgaaccggtgatggcggcgactttgcctttcatgaggtcggtcatgaatttactccttgaagtttgatcaggcgcggccgtggctgacgcgggaacggcgggcgagcgaatcgacgatgacggcaatggcgagaacgccgcccgtgatcatgtagcgcaacgaagagctgaggttgagcagcgtcaggccgttggaaatcgcctggatgacgatgatcccgagcagcgcggaataggcgctgccacgcccgccgaagaggctcgtcccgccgatgacggcggcggcgatggcgttgaggttgacgtcacccgtgccggcctgctggctcgacgaggcaagacgcgatgccgacaggataccgccgatggtcgcgagcgtcgagcagagcacgaaggcgctgagatagatgcggcgaacattgatgccggcgcgccgtgctgcttcgcgattgccgccgacagcgaacatcgagcgcccccattgggtgcgtgtcagcccgtagttcaagaccaccgcaatggcgacgaagaggccgaacatccacggaatgccccggccgaggttgagataatagaccgcgaattcgagggccgcggtcagcacgacggccttgatcgctgtcgcggcgaatggctgcgaggacagattgacggcggcgcgctgctggcgggtccgcaggcccttgacgatgatcacggcgcccggaaccagagcgagcagataagacagccagtcgggcatcaccaggatctggccgaagcggaccagcggggatgcatagggaaggttgatgctgccgcttgggccgaggatgtaaagctgcatgccgagcagcgccagcaggccggcgagcgtggcgacgaagctcggcattccgagccggttgtagagcaccgcgtagacggtcccgatgaccgcgccggccgcgatggcggcgatgatcgcaaccgcgaacgggacgccgttgttcacccagagaacaccgagaatggcggacgacaggccgctcatcgaaccgacggagagatcgatctcgccgagcatcaacacacagacgatgccgagcgagatgatgccgaccgtcgcgcagtcgaagagaaggttgacgaggttgttgggtgcgagaaacaccggattgagcagcgagaacaccgtggagatgacgatcagcccgaccgcgacgggaagcatgccgagatcgccggatttgacgcgatcgatgaaggccccgaccatcgccatcatgctgtcgtcatggcggacgcgttcgtcgctgcggtcgagcgtcgtggctggcgcgagtgttgtatcggatggtttctggctcatgccggtctcccgctgttttcctgtgccgtgcctgtcttgcgctcgatgcggcgcgagacggagttttcggtggcacccgtgatcgaggccacgagttcctggttggaggcatccggcgtgaagacgccgttgtttcggcccaaccgcaacacgacgatgcgatcggcgacggcgcggacgtcttccatgttgtggctgatgatgatgacgcccaggccccggtcgcggacgcgctcgatgagattgagcacctcggccgtctgcgcgacgccgagggccgccgtcggctcgtcgagcatgatgatcttcggattgaggagcagcgatctggcgatcgccaccgtctggcgctggccacccgacagcgaggcgatcggctccctgacagaggggatgcgcgcggccagttcccttagcaaggtccaggcgcgaacctccatcgcgacctcgtcgagcgcccagggcgagagctcatgcccgagaaacaggttggcgacgacgtcgaggttttcgcagagcgccaggtcctggaagacggtggcgatgccgagttccagcgctttgcccgggctgtcgagcgaaacgctctggccgcagaattcgatcgagccggaagaaggttgatgaacccccgccagcaccttgactagcgtcgacttgccggcgccgttgtctcccaccagggcgacgacctcgcccgccttgacgtccagttcgatgtcggtcagcgccgagacggcgccgaaattcttcgacacgtttcgcagtcgcaggatgggctgcccgcgctccggtacattgcttgctgtggtgctcatggcttaaggcctttgtacgtccttgagaaaccggccgcacgctgtgcggccggagtggcggatcggcacttagttgccgatgccgagcttcttgcaaccttcggcatattcaccggtgcagatctgctcgggcgtctggatcttcttgtcgaagatttccgccttgatgttctccgctgtgacgacggccgggatgaagagctgcgacggcgtgttgtagagcgtcgtcttggcttccggcttttcgcccttgatgagctggaccgccacctgtgccgccgcagcggctacgatctcggagggcttggagatcgtgttgtactggtcgcccgaaatgatgagctgcagtgccgcgatcgtcgcatcgttgccggtaacaggcggaacgggattgacgcccgccgccttgaacgcggcgatcgcgccgccgccggtgccgtcattggcggcgaccacgcccttgatatcggcgccgaagcgggtgatctggccggcggcccattcctgtgccttcggcggcgcccattccggcgtgtcgaattcggcaagcgtcttgtacttggattccttcaggccgcgatggatgccgtcgcgaatgaggccggcggccgcgtcggtcggcgagccgttgatctcgagcacgccggctccgtcgggcacgccggccttcttcagctgctcgacaagcgacttggcgatggcgtagccgatgccttcattgtcgaaggagacgtagaagtcggccggcttgtcgggaatggggcggtcataggcgatgaccttgacgtcctgggactgggcgagttccacgaggcctgccgcagcggcggagtcgaccggatcgagcacgacgacctttgcgccctgcgcgatcaccgaattgaactgctgctgctgcagcgacgcgtcgccattggcgttctgatagacgacggtgcacttggcgcacagcttgtccatttcggccttgaagcctggaaaatcgtgctgctcatagcgggtcgacgcctgatcgggcatcaggaacgccaccgtggacgcctcctgggcgaatgctgctccgccaagcgcgatcagcatggtcgcggatgccagggaaagtttgcgataggtcatgttctcctccttaattgaccaacgacaaggttcggccattgccgcaacatcggcctgacgcgcgatgcgtcatcgccccaagccgcggctcgacgagagccgcacggcaaagaggaccaccaatagctgcgaaatcacctcccggtaccagcctcctagctggcacgtatcatcgattgagctcacttgctcaatcgatgaagctagatttgccacttctctcgtttgatgtcaagttagcgcccgatacaggagatgagaattttgagtctggacaagcagcagaagcgcacgacgatttatgatcttgctgaactcgcgggtacgtccgcgagcgcggtcagcgttgtcctgaacggaaactggaaaaagcgtcgcatcagcaagcagctcgccgagaagataatgcgcatcgccgaggagcagggttacgcgctcaacatgcaggccagtctcctgcgccgcgacaagtcgcacatcatcggcatgatcgttcccaaatacgacaaccgctatttcggctcgatcgtcgagctgttcgagaccatggcgcgcgacaagggcctcttcccactcatcacctgcacgcggcgcgacccggcactcgaaatcgaggccgctcgaacgatgctgtcgtatcaggtggactgcgtgatcgcgacaggtgctacggaccccgacaggatcaccgagctttgcgccgctgcaggcgtgcgcacgatcaacctcgatctgcccggcaagctcgcgccttccgtcatttccgacaatttcgcgggcgcccgcgagctgacgcggagaattctcgccagttgccatcagcggtttggctcgatggaaccgctgatgttcatcggcggtcgcggcggcgatcacaacacgatggaacgcctgaggggctttcgccaggcgcatgcggaccacggcatagatatcggtgacgacagggtcatcgcctgcggctacgcccccgaaaaggcgcagaacgcgcttcaggagcgcgccgccagtggcctgcccgtttcgagaggcatgttcgtcaattcgacgatcacccttgaaggtgtcctgcgctgggtgcggcttgccggacctgtcggcgaacaggacgtcgccctcggctgcttcgactacgatccgctcgtggccctcctcggcgacaacatcgagatggtgcgccaggacgtaccggccatgctggccaggatgttcgagctgatcgaacgcggaagcttcgagcctagcgtatccgaaatcccgccggttctaaggtaagcgcatcgccgccacgcgcttaccggcctctcacccatccgagatggctgccacgccgcttaccttgcggcccagagggcgccgcgcctgaatatctcatacatctgcggcacatcgaactccttggcggcatggccgagcgacgagtaaaagacgcggcctttgccatacatgcgcttccagacgacgggcatggtgacaccatcgatccagtaggcatgttcgccagtgaaagtcgtcgtcgccagcacctcgttcgacgggtcgacatgcatgtaatattgctcggatctgtagggaaaatcagttatatccgccataaggggatcgtccgggcgcgtgacgttgacggtgtagtcgatgatgttgccgggatgggcaacccactgaccgccgacgataaactgatactcaacgcattcgcggaagctgtcgccagcgcctccatgatagccggcaaagccaacaccactttcgatcgcctgcgcgagaccctttacctcgtctttctcgatcttcgacatggtcacgatcggcacgatgagactgaagtcccgcagatcttggctggcgaatatgcttgtcgtcggctcgaccatgacgtcgaagccctccttcacaaggagatccctgacgatagccgagcattgctggggctcgtggccttcccagccgccccagacgatcagcgcgttacgcatcgttttttcctcctgagtgttacttgccgagcagaccgtcgacgagagattgagaaagcggagcaggccgctccgttgtcgtggtgagtgttatcgtgcgaccggagtcggacgccttctggaaggcctccatgacttcgagcacatgcagcgccagatcgccgttcgcgcgatgcggccggttggaccggatggcatgggcaagatcggcgacgccgagcgagcgataattgccgtccgaatagggctgcctcaccggctgatcgaggaagtggccgcctgtcttctgaaattcgaccgtgccgccgaaatagttcggatccggcacgatcagcgtgccctcggtgccatagacttcgagcggcacgtgcttgtggccggcgacatcgaagctcatgccgatctgcacgacagcgccgttggcaaaagccatgataccggcgacatgcgtggggacgtggaccggtatccgctcgccgttgcgcggctcgctggtgacgacgcgttctttgcggggcttagtcgcgagaccggcgaccttggcgaccggcccgagcaggttgacgagatcggtgatgtaatacggccccatgtccagcatcggaccgccgccgacttcataatagaacgcaggatttggatgccagcgctcatggcccgggcacatgaacgttgcggtgccgccgaccggaatcccgataacaccctcatcgatcagggcacgggcagcctgatgggcgccgccaaggaaggtgtcgggcgcggcaccgatgcgcaggcccctggccctggcggcttcggccagctgcttgccttcggcgaagttgataccgagcggtttttccgaataggtatgcttgccggcctccagcgcccgcagcccgacggcgacatgcgccttgggaatggtcaggttgacgatgatctcgaccttgggatcatcgagaagctcgccgaccgtgcgggcatcaagattgaactccgcggccctcgtttgcgcgagttcgtgattgaggtcggcaagcccgcggatgtcgaggatcgggaatgccgaggtcatcgccttcaggtaagccgaggaaatattgccgcagccgacaatgccgacaccaaccttgtccatcacatgctccatcaaatcgtcgtttgaagccggcgcctgcccggctccgggtcaaccgcgttcaagccactgaacctccgccggcgtcaggcttatcgacgccgcgttgaggctatggcgcaactccgcgagcgtggcgggaccgatcaacgggaccaccggccacggctggttgagcacataggcaagcgcgatctggatcgggtccttacccaggcgctgcccgagctcctccgcccgcgccttgcgctggaaattgaggtccgagtaccaggcgcgggccaattccgggtcagacatgtttcctggtgcggatcgatcggtaaagaagccccgggcctgactggaccaagcgaagttgacgaccttcttctccctcaaccagcttttccaatcggcgtcggacgaagcaatgcatccgggccacaccggatcgaccatctcggcgagcgagaagttgttggagagcacgctgggcctcgttttccccgtgcgctccgcgtattcgatcgcctggtccatgcgctcgcgcgtccagttcgacccgccgatcggaccgcggatgcgccctgaccgcacctcttcatccatggcatcgacgaactcgccgaccggaatgtcgggattgtcgcggtgcatgaagtagacgtcgacataatcggtctgcatgcgttcgaggctggtggtcagctgcttggcgatcacgtcgggatagcagagcggcgaatgggcgcctttttcaatgatcaccacatcgtcgcgcacgccccgactgcggacccattcgccgatcagtctgtcctgcgtccctccgccatactggaatgcggaatcgatgaggttgccgcccgcctcgtagaattcgtcgagcgcgatggatgcggccggaaaggtcgaaaacagcatcatgccgagcgccagcatggatgtatccttttcgacacccggaatatgcccccttggcaccatctgctgcttgcgggcgagcgcctcacccgtcaacgtccgggtgcggaccgccggcgtttccagcttgtactccaggccgatcgccgcgcgccacttgtccatgaccttgaggttgccgagcgtgtcggcggatgtcatgccgggataggcaaactcgcgtctttcttcgcggatcgcggcagcggccgcatccacctcgaagctgtagacatggcgtggttcgtcgacggcgatgtcctgccgtttgccggtggcatcgaacagccggataatcgcggtcccaccctgcttgccggcggcaaaccagaactgatcgatctcgatcgaaccctccgtgccgaagatgcgcagcacattgtcctgcgccagcgataccgagcaggacacttcggcgatgatgtcgttcgggaagcgcaggacggccgcactccattcgtcgacgccggtcgagccgagatggccgaccgcgaaaacctgatccggctcgatgatgccatgcggttcagcaatgccggcgatgagccgcgccatcgagacaggatagccgccgacatcgagaatgccgccgccggcaagatcattggcaaacagccgatgatccctctcgaacggctttgcgaaaccgaagctggacttgattaggcggacgtcgccgatcgccttgtccttcaggagctcgatcagcttcagcgtcagcggatgaagcctgtacatgtaggcttcgccaaggaaggtgccggcttcccgggcggcggtctgcatggcctccgcctccgctgcggaaagaccgagcggcttttcgcacagcacatgcttgccggcccttgcggccttgatcgcccattcggcatgggtcggatgcggcgttgcgatgtagatcgcgtccacatcgggatcggcaagcagcgcatcgtagcccttgaggatgcgcgcgccggggaagcgctccgcaaggcccggcctcgacgggtcccgcgtcgcgatcgcctcgacgcgaccggttttcgattgggcgacgccggcggagaagtcagccgcgatccggccggggccaaggatgccccagcgaagtctatccgtatcggtcatgtcctgttcctaatctgtcgggccgccggccttcccggcgtccggtcgtttcaacaaaattgaatggcggcgcagtcgtagccgtcgagcgtaagtgtgccgtccgatgaggagcaggcggcgatcgtcgttcatgcgcatcgtcgatcccagtctcaaccgtcgaggatcgtcttgcgggcgctgatcgttcgtccgccgtcggatgcgaagaggtacagttcggaagggtcgagcttcagtgtcaccggctgctccgccttgaaaggcgcgacatagctgagctgcacggtgatattgcccgtgccgctttccgacgcgaccgtgcgaaggttgccggcgtcgacatagaggatcgtctcccgaccaagatgctcgacgaggcggatggtgccgctgacgacgccggttgacgatccgtcctggaccaccgagatgttttcgggacgaacgccaagcgtcaggccggcacccttccgcaacgccgccggattggcgagcgcaaccgtcacgggcgcaaggcccggagctgaaacacgaacctcgtgacccgagacgtcatcgatggtgaccgacagaaagttcatgcgcggcgctccgaggaagccggccacgaagagattgtcgggattgcgatagagctcgagcggcgagccgacctgttcgatattgccctggttgaggacgacgatgcggctggccatggtcatggcttcaacctggtcatgcgtcacatagaccatggtcgcgccgagttcggcgtgcaggctggagagctcgacgcgcatttgcgtgcgcagcgccgcgtcgaggttagacaacggctcgtcgaacaggaagacatcgggcgagcgggtaatggcgcgcccgatcgccacgcgttggcgctggccgccggacagttgtttcgggcgcttttccagctggtcttcaatgcgcaggattttggcggcgcgcgaaacggccgcatctatttcggccttgggccgcttggccatgcgcaggccgaaacccatgttttcggccaccgtcatgtgcgggtagagcgcgtaggactggaagaccatggcaatgccgcgatcgcccggctcctcgcgactgacatcgcgcccgttgatgaggatctgcccggaggtaattccctcaaggccggcaatggttttcaggagcgtggacttgccgcagccggacggaccgaccatgacgatgaactccccttcggccaccgagagatcgatgcctttcagcgcgtgataggcaccgtagctcttgtttatctgtcgcagttcgaggctggtcatgcttcctggctctctgcttttgaagatcggatattcgggtggttgcgcgtgttcatcccttcaccgcccccatcgtcaggccggcgatgaagtggcgttgcatcaggaagaacatcacgacaggcgggatggcgacgacgatcgtgccggccgaaatcaggttccacgccgacacccattcgccgcgcaggttggcaaggccggccgtgaccggcttgacggaatcgctgaccgtcagcaccaccgcccagaaatagtcgttccagataaaggtgaagagaaggatggcgagtgcggcaagcgccggacgcacaagcggaacggcaacatggatcagcgtctggaacggtgtcgccccctcggcccgcgctgcctggaacagctcatccggcagggccgcgatgaagttgcgcatgaagagcgtggcgaagccggtctggaaggcgatatggaagatgatcagcgccgccgtcgtgtcgatgaggtcgaggcggaccatgaggtcgcgcaccggaatcatcatgatctggtgcggcaggaaattgccgccgacgaaaagcgcgaagatcagcatgttgccgggaaagcggtatcgcgaaaggacatagccggacaaggtgctcagcacgagcacaccgatgaccgagggaatggtgatcgtcaggctgttgatgaagtaccggatcatcggcgtctgcgtgaagaccgccttgtaattgtcgatcaggccaaactgggttggccagccccagaggttgccgcccatgacgtcagccgtcgagcggaaggacgtcaatatgatcgcgaagagtgggcagagccagagaagcagaactaccagcaccgcgataaaatagaaccgtcgatgccagatggctgtttcgggaattggacgaggatacatcagccacctctctcttccgtgcggatgatccgcgacaggtaccagacgatgaacgccgccatgatcacgaacaggatcgaggcgatcgccgcgccatatccgaagcggtaggaaaagatcgactgttcgtacatctggtatgccaggaccgacgaggacccgaacgggccgccgcgtgtcatgacagacaccatgtcgaaggaacgaagcgcaccgacgaccgtcaccgcgatggcgatgaaggagacctgtgtgagctgcggaaggacgatgtgccagagcatgttccatccccgcgcgccatcgacacgtcccgccccgataagttcctcgctgagattgttgagaccagcgagatagaggaccatgcagaaggtgatctgaggccatagtgccgcgatcacgatcgcgaatgtcacgaattgctcatcggaaagcaccgcgggcgcaacggctccgaatgccctgaagatcagcgcgagaagtccgaactcgggtgtgtagacccaggtgaagaccacgccgacggtgacggaagcaagcacgagcgggatgaagaacagcgacttcatgaagcgcatgccgcggatcttctggttgacgagcagcgcgatggcgagcccgagcggcggtgccgccatgaacatgacaagccagatcaggttgttcttcagcgacgtatagaactgcggatcgttgtagagctccaggtaattgccgaagccgatccacgtcatcggccccattccgtcccaatcgtgcaggctgatccacaggctgcggacggcagacagaagaatgacggtgaaaaacaggatgatcgctggcgcgatcagcaaagtcggggtgagccaccatcgctggcggcgccataacatcaacattgtccagaacctcaagaggaagtgagggagcggaaccgcaactccgccccctggtcgtcgggaggagaactagatcttgtaaatacgcttgcgggtgccctcgaggcgctgcaggatcgcctgtcggcggtcgggcttggccatgaattcctggaagccgacgagaccagcctgagccatatcgggatcgctgtcgcggtcgtaatattgcgacgttcccttgacctgcttcaaggattccaccgccgcattgaccagcggatccttgcttggcggcaaatcgctgcgcggcggcacgttgccgccgggctcaagataggtggcgaggttttccggcttgtagaaataggccaggaattcgcgcgctccctgcttgttcttgccattggccggtatgtggaccgaattgagcgaaaactcctcgaagcgcggaacgctggcatccagcgtcgggaatggcgcgaaggtgagctgaggcagatcggcctcggtgaaagccgcccgcaggaaagcgccgagattcatcatcccggccttcttctgggcaagcagggccgcggcctcctgccagccgaacgacgtgtggttctgtgtgaacacctcgttcttgatcatggcttcccattgatcgaagaccggcgtcagcgccggatcgagatagctcatctggccgtccatcagcgccatgtgcttgtcgaggccgttgatccgaaggttcatctgatcgaaccagcccgcggcgggccaaagctccttcgtccccattgccacgggtgtcagcccggctgctttggccttgtcgcagtaggccgcgaattcctcggccgacgtcggcattgtcagcccattctgttcgaacacgtccttgcgatagaacatgccccagagcgtacccccggtcggcaagccgtattgcttgttgtcgacggtcaccgcgccggtgctcgcgccgagcacatccttgtacttttccttctcgaacaggtccgaaatgtcgtcgaaaagaccgcgcttgacgaaggcccgcatgcggttgccggaaaaccagaagcagacatcgggcgcgccggccgtcaggtagttgcgaatcgcggtcttgtgggcctcgtggtccatattgttgaccaccaccttggtgccggcctgcttgccgaagtcctcggcgatcttcttcagcgcttcgagcgccttgccgttgctttcagcggaaatcacgttgacttcctgagcctgcgcgatggcggggatcgggaagctgcctgccatcgccgccacggaagccagtcctgttcccttcaggaaggttcggcgcgtggtcgatgaaaagtgcttggaaaatgacattgaattcctcccagttgagctgatcaacacgtcccagcggccgtcctccacaacgagacgccgggtattcaacgtgccgaccgcgtcattccgagttgatcgacgaggcaaatttatgcatagatcatccaacgtcgcaatagttaatttacaaaattaaggaactcgcaccgtgaagctcaagggcgacccgacaacgaccagagccctcaaccgccgtctcatcctcaatctgctgcggcaggaaggtccgagaagccgcgccgaattggcgacactgtcgggcctcagccccgccgccgtgacattcgtcgtcgccgaccttgtggaggaaggcatcgtcaaggagggcgaggcgatttcgggcatgacggggcgccggccaatcccggtccagatcgactatgatcatggcatcgcgatcgggttcaagctgatgctcggggccgtggagtgcgtggcaaccgatctcgcgaccaacccgatcgcggccatgcggctcgggctcgaggatcacacacccgacgccatcgccgatgtcctggccaaggcggtacccaggctggtcgcgcttgcgcagcgccctcaggcgaaacttgccggcatcggcatctcgatgcccggtgtcatcagcaatgatcagacctcctgcgtcagaagcaatcgcttcgactggaacgacgtgccgctcgctcgcatgcttgcggcacgcgtcagcgcacccgtctggcttgaggacgacaccaacgcctacgccatcgcccagcaactgttcggcctgggtcgccagcacaggaacatggcggtgctggccgtaggcgtaggcatcgcctgcgcccagatcatcgagggcaaactgtatcgcggggccaatggcgcggccggcaagatgggccacacgcttttcgagccgaacgggagaccgtgcgaatgcggcaagcgcggctgcctcatggcttaccactccgaggcggcggtcgtgcagcgctggcgcgaggcgacgggggggcgcgacaaggggccaacggagttgcgcagcgcgcttgcagcggcagatcccgtcgtcgtcggcctcgtcgaggaggcaggccgctcgatcggaacggcactcgccaatatcaccaacatcaccgatccggaggtcatcgttgccggcggagaggctgtctccctgggcgatcacttcctgcgcccgcttcggcatgcactcgccgagggggctttccgatcaccgcctcccctgctgctggactggaaggacaactcctgggcgcgcggcgccgcggctctcgtaacgcaacgcatgttcgactttgaactatcgggaggggtaaccagcaggaattgagcccacctggcgccggccggcaggacggagcagcccttggcctgctttcccgttccgccggcagccccggcccgcgcgagccgatccagacccctatcacccctcattccgctcgacgtgacatcgggctcggccgggatggcacagtcgatctcagcctccgagcacgaagcgcgagaacgcgagagaattgcgcgcatcctcgtccatcttggcctcgtccgcgccatccgtgagatcgcgccacacgcgaatatcggacccgatcgtgccaccggtcttgacgaacggctccatcacgacggcacctgtgtagtttatctcacgcagcgcgaggccgatttcgtgccacggaatcctgccctttccgggtacgcggcggttgctttcaccggtgtggaaatgcccgagcagcggtccggctgtacggatggcatcgccgaagctgtcttcttcgatgttcatatggaaggtgtcgagcatcaccttgacgttcggcttgccgacgtccttcacgaaggcaacgccttcagcggcggtgttcagcacatggttttcaaaccgattcagcacctcgatgcaaaggttgataccaaggttgttcgcgaaatccgcgatcccgtgaatgccttcgacaccgcgcgcacggtcgccgaccttgtcgaccggctgcgaatagtcgaccggccagtaggagtgcagcgcgccgccgatcgacttgatgtcaagcttggcgacgttcgcaagcgtctgctcgaagaaggccttgccggccttgcgcacgtcggcatcgggcgatgacaggttcttcgtcttggaaggaccgataccggccgtcaggatgatgccgttgtccttggcgctttgcttgatcgctgcgagatcggcatcgctatattcgttgatgtgatgcgcggcgacttcgatcacgtcgaacccgagcttcgccaccttctcgacgtaagggccgaacttcgcgctccattcgtgttcccagtaggagtagtagataccgtgtttcataagagcctccttgaggtttcagctatctttggttggtggcgggcaggcggagggcaccgacgaagacggtgacagccgcaatgcatccggtccgacgtcgcgaattagttgttgtcgatgcgtcggtcgggctcggcgctgcccgatatgatggcaaggccattcggcagatcgttctcttcgaccttgcgattgatttcctttggatcgagaccataggaccgccaacgatcctggagccgtttgcgcagattgtcctcgctgacatcaacgaagaccgtgaagtcgaaaatcggcttgagcctgtcccatggcgcctggcgggaaagcaggtaattcccctcgcagacgataatctcggtcgcctgggggatcagacttccaccggctcgggcgatctcgatcgatcgatcgaagacgggaacggcaacgacgtcgtcctcgttggccttgagccgctccagcattcgacgaaacccgtgcgcgtcgaacgtatcgatggcccccttgaacggccgccggcccatcttctccaggacgatgtcatcgtagtgatagccatccatggggaacagggccgcgttgatccgatcattgttgaggccctgcacgaccttttcggcaagcgtcgactttcccgatccgggagcgccggcgatggcgacaagaacccgcctgccgccatttcgcgacagacgctcagcggcgaccgcggcgatctcactcgcgttttcatcgattttgctcaaggaattcctcccttccatcggcctcatgcctacgcgccgaagtccttcattccatattgcgccgccttgccgcgcaggaacgagagaccgtctcccatgacttcctcttcgtcgcgggccacaggacgccacgtcgagatatcgccggccatctctttcggcatgccgacgaagctctcgagaaccagagcgcctttgaagccgattgccgaaagcgcgacgaagatcgaatcccatggcacgttgccggcaccgggggcaccgcgatcgctctccgacatgtgcatgtatttcaggtgatcacgtgccgcgagaatgccgttggcggcgcccttttcctccatattcatgtggaacgtgtcgagatgcacgaagacgttgtccattccgatccgctcgaccagcgccacggcctgcgcggcggtattgatcagatggttttcgtatcggttcacggcttcgatgccgagttgaatgcccctggacttcgcccgcctcgccgccgcttccagcgcacgcgccagattgtcgtactccgcctgagttggcagtgatccggttcgctcattggtgccgccgaaggtcacgccggtgagagcctcggcgcccatctcggccgccttgtcgattgccgtctccaggtggaggatcgccgcgtcgggtcgccgcgacgcccatgccggctcgggcagaacaagcgagcaggctgccctgatattattcttctcgagaagagcgcgcgtgtacccggcgtcaaccgacggcgcatcgagcaacgggatttcaatgaaacccagctggtacttccttgcgccggcaatggcccgctctgcgcccgcgtggtcccacgtcatggtccacatgcttgcgtgaattccaaaaccctgcacggttcatcccttctttttatgtgaggccatgtaggccgaaacgatggttcgcgcggccatgacgacgatcatcagaacgccccatagcgcggtcgcgagatgttgattggcgcccatcaggttgagaccggacgacaggagctggagcacgatcagcgcaacgaagaccggcagcacgcgtccgaagccaccgaaaggattgatcccgcccaggaacgcggccagcaccgtgatcagcaggtaggactcgccgtgtccgacacggacggagttgaagcgagcgagcatgatcacgccagcgaccgcgcacatcatgccggacagcgtatagacgaggaccaggatgcggcgcgtgttcagaccggaatactgggccgcctcgatgttcgagccgatcatcagcagcccgaagcccagcttgaagcgtatcagcagcagctgccacaggccgacgcaaacgatgaagatcaacagcgggatcggcaggccgaatatctgcccgtgcccgatcggagcgatgaagttcgggaagccggagacgtcaccgccacgcgtgaggaactcgccgaggccacgcaggaagatcatcatggacagcgtcacgaggatcggatgggcgcgcgtataggcgatcgccgctccggtcatcagacccgccgcgccgccggtggccagcgctgccagaacaccgagcaggaaggcggacggaggagcatcgaccccgccgtaggactgcatcacccaggccgccgcaagccccgacagattcgcggtgaatgtgaccgacaggttgatgccgccggtcagaagcggaagcagcatcgcaagcgtgagcaggccgagttcgggcagctggaaggcgacggagccgaatgtcgcggcggagatgaagttgttggctgcaagaccgaagatgatcatcacggccaggaaggcgatggccggccctgccatgtccgcgccgaaggtggcattgaaccgttgagcgatggctttcatcagtgtgtgctcccccttctggcgccgcccttggcaaggaacggcagaagcttgtcgatacgtgcggatgagagcgtgatggcgacgagaatgatagcaccgacgatcatcttgaacgcgaatggcgagacgcccatcaggttcaggccgttctgggtgatggagaccatcaacactcccagcacgcagccgatgaccgagccctttccacccccgagccgggccccgccgagaaccgtcgctgcgagaacgtcgagttcacggccgtagagagcattcggaacgacctcctcggcgtagtgggcctgcatcagtccggcgataccggccatcagcccgagccagccgaacgaaatgtagtgcatggccccgatattgatgccgaagcggcgcgcgccctcgggattgtcgccaaatgcgtaaagctggcggccaatggtcgtgcgggagatcatgaaccaggtcgcgacgcagcagacgatcatcacgacgaccggcagggtgagctccacccatgagccgtccgccatctcgtgctcatagaagacaacccgcgtcgtcagccattccggcaggtcgtagatcgacacgcccttggtgaagaacatcagaagcccgaagaagatgttgaaggtcgagatcgtcgcgacgatcgagatgatgtgcagtcggtagaccagcgccgcgttgatcaagccgagcccgatgccgatcgcgccggcgatgatgaaaccctcggcccagttcccaccccccaatgcgccgagcgcaagggcggtcacgtactggacgaccgacgcggcaacggcgaaggaaatgtcgatcccgcccgaaatcaggaccacgagcagcccgacggcaaagatgatgttgacggccgagacgttcagcacgtcaaacgcgttcgagacggtaaaaaaccgatccgtctgaaaagacagaacgatgcaaagaacgaccatgaccgccagaagcgtgaattccgtcgtgtgtcccaggatcaatctacgcatagacggcggcctccagttcggcgagcgacacgtttctagggtcataggtcgcgtggatcttgccttccaccatgtggatgatgcggtcggcgttgaagaagacctcgggtggttcgtccgagatcagaatgatcgccagtccctgcgccgccaatttgcgcacgatctcgaagatcccggcgcgggcgccgacatcgacgccgacggtcggagcatcgaggatcagaatcttggggccgatggccagccacttcgcgatcgcgacgcgctgctggttgccgccggagagcgttcgaatggggtcatccggcgtgccgatcttgacaccgagcgccttgatccaatgatcgacgacgcttgccttcctggcgggagagatcattccgcccgacatgagtttgtcgagcgatgccatcaccaggttgtcggcaattgattgcggctggttcaggccaagcgacaagcggtcttccgagaggtaggcgacgcccgcgcgaatggcatcccggttggagccgaagctcacgcgcttgccctcgatcgaaatttcaccggcctgcgggcgatgcattccaaaaatcgtcagcgcaagctcggtgcggccggcaccaagcaggccggtaattccaagcgtctcgccgcgcctgaggtcgaacgtgacgttctcgaactcgccggcgcgcgtgagcccgcgcacggacagcaccacgcttgcgtcgtcatggtcggcagcgatcaccgagctgtcgaaattccgtcccgtcatcagttccgtcacgcgggattgggtcatcccttcgacagggaacacgccaacgagcgcaccatcgcgaaggactgtcatacggtcggaaatctcgaggacttccgcgaggcggtgggaaacgaagacgacggcgacaccggatgccgacagatgccggacgatgtcgatcaggtagtccgtctcggactgtgtcagcgatgccgtcggctcatccatgaagaccagccgagcctcgccgaccagtgcgcgcgcgatggcgacgatctgacgttgcgcgatcggcagttccttgagcggcttatggaggtccaggctgaccccgagacgcgcaagcgccttctcggccgcgtcttcgatcttgcgcttgtcaacgaggccgtacttgccgttgaccgcgtattgaaaaccgatgttttcggcgacggacatctccgggaaaagcgcgaggtcctgccagatgacttgaattcccagcgactgtgcgagcgtcggcgtcatcgcaccgatcggctggccgtcgaagaagaactcggcaccgtcctgtggtttgtagacgccggtgatgaccttgatcagagtgctcttgccgcagccattttcgcctgccaggcaatggacctcgccgggattgacctcgaacgaaacacctttcagggcgcggacgccgccgaaggtgaccttgatgtttttcagtgaaaggagcggttgagcgctcatagcatatctccctgatcagccgccggtggcggggtgcgcaggtgccggtagattttagttggaggtcgcgaggagcatgctccccgcgacccaggcctgggcttggggaggatcagaggcccatggcaaccagcttgtcgatgctatccttgttgatggccaagagctggtcgacgatgatcgtgttgccctcgggattgattttcccgagaccttcgatgtcatcgcccgccttgggaacttcacccttggaaatacgatccgcgagcgtcacgaagacctcgccggcctgcttgggattccacatgaagccgcctgtgagcgcgcccgatttgatgagcttcgcgccttggcccggcgagaacggaccgatgacgaacaccttcccgtccttgcggcgctcttcgaccgcgcggccagcgccgatcggaccctgcgacccgaaggcgaggaagcccttgaggtcagcattcgcagccatgaggtcgagggcggtggaacggctcttgtcgacatcttcggccacgccgtagcggtcgccaaccagtttcatgtcggggtagttggccttgatgtaggcgatcgccgcatcagcccaggcgttgtgcagcggaacggtcaacgagccgacgaataccgcgtaggagcccttgccgcccatcttttccgcgagaagcttgccgtgcgcttcgccgaagcccttggcggaagccagttcgaaatcccagtccgcgccgacctgcttgggcgattcatgagtaatgaccttgatgccggcttcctgggccttcttgagaaccggctccagcaccttggcgtcgttcggtacgacgccgatatagtcaactttctgggcgatcaggtcttcgatcgcgcgaacctgaagagccggatcggcgctggtcggaccgaccatgaagccttcgacaccgagcttgctgctctgctccttgatccccgcctccatggcattgaaccacgggataccgccgatcttcacgacaacaccgatcttcggcccagcgaaggcggtggatgcaagaagcgtcagcgagaggccgagcgtgactgcgagcattctcttcatggatttctctcctccgatactgacaaaggagatgcaccacacgagcaccatgcctgtgtgctaagcgctttcggctccatgacagaacctcctcccttgccgctttcctcaaagctaccattttgtgcacaatcgttattgctttcttgcacaatcgatggtgcaatgaacatatcattaaaaagcctttcgtcaagaggctcgattgttctaaatagcgaagaccagcgaggagattcgtggatgtcggaaaaagaacaaaagaaagcaacgatttacgatttgtcgcaggtatccggcgcgtccccgtcgactgtcagcgcggtcctcaacggcacctggcgaaagcgccgcatctccgaggaaacggctgaaaaaatcatgtcgctggccaaagcgcaccgctatacggccaatcttcaggcccgggcattgcgaagctcacgatctggtctgacgggcctgcttatacccgtttacgacacccggtttttttcttcgatggcccagacattcgaggcaaaggcgcgacagcgaggactggtgccgatggtggtttccggccggcgcgacccggaagaggaacggcgtaccgtcgaatcgttgatcgcatactccatcgattcgctcttcgtcgctggcgcgacggacccagacggcgttcatcaagcctgcctcagagcaggaattcctcacgtaaacatcgacttgcccggcaagtacgctccatcgatcatctccgccaaccgccatggcgcggagctactgacgaccgcgatcattcgacacgccgagcgagtggggccgctgaccgccgacgaggtgttctttttcggcgggcgtgacgaccatgcgagccgcgaccgcgtgatcggctttcacgcggtgaagcaatcgatcttcggcagcgacatcgcgaaagacgatatcgagaccaccggctactctcccggcatgaccgcgctggccttcgagcgcttctatgaaaagcatggccggctgccccgctgcttcttcgtcaactcgtcgatcaatttcgaagggctcctgcgcttcatgggacgccacgatggcgaggccttcggggatatcgtggtggggtgtttcgactacgatcccttcggatcgttccttcccttcccggtctacatgatcaagccggatgtttcggagatgctcgaccgaggcttcgatctgctggaagaagaaaatgcgcagccgcagatcatcatgatcgaaccgcaactcgttcctccgcgaacagccttggaagggcctctcgacgcgataaaggacccctcgccgacgacagaacgtccggccgttccatcgaagatatgaattgcggcggcttcggtccccgcgtggccggccaacggtcgtgatcggtcggacagacgatgaatctcgcggccgcctggccgtttcccgcggccgagttgattttgtttcgatgtcgcgatagccggtagatcaaagcaaaacgcacgggaccatcatgtcaaaggttgaccttcgcaagtcggttgtggaacgcgtgcaggcggtggccggcagcctgacctcgacggaacaacggctgatctcggaattgttgaaggcgccgcgcgacgtggcgatcggcacctcgagcgaattcgccaacaggttgggcgtgcatgaggcgacgacgtcccgccttgcccgcaagctcggtttctcctcctatgccgagttccgtgaccaactgcgccgtgaatttctgaaggtttccgatccggccgagcgcatttccgcgacgctcagcgacgcccgcgcccgaggctttctgccgctcctggtggcgagcgaactgtcggcgctgacggccatgaccgaccacatcagcgacacccgcattctggaggcggccgagaagctcgaccggcggcgggtattcatctacgggcacggcaacgccgaggttctgtccgtgctgatggaacggcggctgcggcggctgggcatagacagccacccgctttcgggcagcccgcgtgatctcgccgagcagatgctgaccctctcggaaagcgatgccctcctcctctttgccttccgccggcagccaccggactatgagcggctgatgcaggtggcggccgagaccaaggcgaagaccgtggtgatttccggcacgatcggcccatcgctcacgccgagcccggatgtgctgctttccgcccctcgcgcgggcatgcccgacagctttcagacgctgacggtgccgatggcgatctgcaatgccatcatcctcgccttggcggcgcggcgcggtcccgaagcactcgccaccctggaccgtctgggtgagctgatcgcaagattcgaaagttgatttgcaagaaaacttgcacgtcataaaaccgtcgcaagaaaacactacacgtggccagacccaacaacggagccacgtccatgcgccgcgtcctgattgcaaccgcagcctttctgatgaccaccgccgccttcgcgcaagaactcgacaccaagtccgccgctgacctgttgccgcaggccaaacaggaaggcaaggtgacggtctacgctttcaccagccgtatcggccgagtcgagaaggcgtttgaagccgcttatcccggcatcgacatggtcactttcgacatgtcctccaccgagcagatcgcccgcatcaagagcgaggcgcaggccggcctgccaggcgccgacgtgatctacatttccgacgccccgatcgtgctgaccgagcttctggccaacaagctggttgcgccttacgtgccgccgcgtgttgcaggtgatcttgcggatgccttcaagacgccgcttctggcccagcgcctgtccaccaaggttctgatgtataacgaggaggcctatcccgagggttcgccggtcaagaacctctgggacctgaccaagccggaatggaagggccgcgtgatcatggtcgatccgctgcagcgcggcgactatctcgacctgatgaccgagatcgtgttgaaatccgacgagatggccacggcctatgaagccgcgttcggcaagaagatcgcactgacggacggcaacgagaacgccggccagcagttcatcaccgatcttttcgccaatgacctcgtcctggtcggttccaccgacgacgtgaacaaggcgatcggcgcaaagggccagacgaagccgccgatcggcttcaccagctattccgaccgccgcgacaacgaggatgaaggctgggctctgcaggtggcaaacgacgttgccccgtccaacggtatcgttttcccggcactgctggcgctcaatccaaagccggcgaaccccgctgcggcgcgcctcgcggtcgatttcatgatgggcgatgaaagcgaaaacggcggcgaaggcttcaagcccttctacgtggccggcgactgggcgacccgctccgatatcaagccgcacaaggacgcgattccgcttgccgacttcaagggctggcagatggcgccggcagaaaccgcgaaaatccgtgcacaggtggcggacttcattcttgcgctgcagtgacgttttcgaccggagatgggcggttgggccgcctgtctcctctgtttctgaacgcggttctgatcgctaccggcggtgagcacgcctgtctttggtctccggttcgagccggacattagaatacagacaacacaacagcgcgggcggcacagccctgccctcgttatccggagcaacacatgaaatccccgctcggaccgatcggttcagcattcggcaagcgcggcctgacactgatcatggcgctggtgcttgtcgtgctggtggcggcgccgcttgccaccattctcgtgcagacgctttatccgtcatccgccgcctggggcgatgttctggcaagccgtctgtcgcaaaacctgttctggcggccgactgtcaacaccatgatcatcggcctcgccgtggctgccggttgcgtgttgctcggcggctttctcgcctggctggtggtgatgaccgacatgcccggccggccggccatcgccttcatggcgacgctgcctttcatgattccgagttttgccaccgcgcttgcctggggcacactcttccgcaacggccgcgtcggcggcgccggcggccttctggaaggccttggctttgccgtgcctgactggctgtcctggggcatgacgccgaccatcgccgtgctgatcgcccaatattatgcgctggctttcaccgtgatcgcggcggcgctcgccaccgtgaacggcgatctcgtcgaagccgcacagatgaccggagcctcgcgcaagcgcatattgttcggcatcgtccttccggtcgtcactcccgccgtcatcgccgccggttcgctggcattcgccgccgcggtttccaatttcgccgctcccgccctgcttggcctgccggtgcgcatgcagacgctctcgacccgcctgttcggcatgatcgagatcggccagacggagcgcggatacgttctcgccatcctcttgatcggcatatccgccatctttctcggcctcggcaatcgtgtgcttgccggccgccgcagctttgcgacgatcggcgggaaaggtgcgcgtccgcgccgtttcgccctcggcggcgcgcgtctgccgctgacggtcatcgcctggatcgtgtgcattctcacgacgatcctgccgatccttctgctggtggcggccagccttgcgccttcgtcgcttgcgcttttctccgactggactctgcattactggatcggacgccccgatccggccttcgcccgcggccaaccgggcatcttttacaatccgcagcttctctcggcactcaccaccacgctggggctcggcatggcggtggcactcgcctccaacgtgatcggcatcctgatcgcggtcgcgcttacacggcagaaggttccggtactgagcagcctagtatcgcaactgagttttctgccgatgctgctgcccggcatcgccttcgcggccgcctatatcgcgctttacggcgcaccgatcggcccgctgccggcgctttacggcaccaagcttctgcttggcctggccctgacggcggccacgctgcccttcgccgtgcagaccggacgggcgacgatctcgcagatatcgggcgatatcgacgaggcggcgcgcatgaccggcgccggcttcctgcgcaggctcggcgccatcacgcttccgctggccgcgcgtggtctcaccgccgggctgctgattgccttcgtcaatgtcatcggcgacctgacgatcaccatccttctctacacgccgacgtcgccgcttctggcaatcctgtcctattcctatgcatccgacgggttctaccagttcgccaatgcggtcacgctcgtcatcctgatcatttccatgctggctaccggcgccgccacgcttctgcgcggtccccgccgccagtcctttacgtgaggtcgcgccgtgatttccctcgaccggatcacaaaatccttcggcaattccaatgccgtttccaatgtcagtttctccgtgccggaaggttcgtttctggttctgctcggcccttccggctgcggcaaaagcacgatgctgcgcatgctggccggtctcgaccagccgacatccggaaaaatgcggtttggcgacacgctggtggccgatggtgaggcgggcttttcgctgccgccggcggaccgcaatgccggcctggtgttccagtcctatgcgctgtggccgcatatgacggtggccggcaatatcgaatggccgctgaaggtggcgaaactgccgacagaggaacgcggcgcgcgcgtggctgacgccatgggcatgctcggtatagaaaaactcgccaaccgttatcccggcgagatttccggcggacagcagcagcgcgtggcgctggcgcgcatgatcgcgccgcggccgaaagtgatgctgttcgacgaaccgctttccaacctcgatgccaccttgcgcgtggaaatgcgcttcgagcttctgaaggtccacgccgccacgggcgcaaccgccgtctacgtgacccatgatcaggtcgaggccatgacgatggcgacgcatgtggcggttatgaacaatggccgtatcgagcagttcgacgcgccggacaggttgctggccgagccggcttcggccttcgtcgccggtttcgtcggcaccccggccgccaacctgatcccgatcgagaacggcaactggttcggcaccatgcccgatccgctgctgcgtgatcattccggccacgcgatggtacgggccgaacagatcacgctggccgacgaggtaggtccgcgcacattcgatgccgttctggccgaagtggtgccgatggccggccggtttctcgtgaccggcatcgtcaacggcatccgcatcaccgccgtctccgaccaggtcgctcgcccctcgggcaggctgcgctttcgccttccgacggcgccggcggcaattttcgacaaacagggaacacgcatttcatgaaacgcatccttctggttcgccacggcgaaagcgaatggaacgccatccgccgcctgcagggacaggccgatatcgacctttcgcaacgcggcagggagcaggcgcgggcgctggcgccaatagttgcgagcttcaggcccggactggtgatgacctcggatctgaaacgtgccgtgcagaccgccgctttgcttggctacccggaggcgggccatgagccgatgttgcgtgagcaggatgtcggcacctggactggcgccgagattgcccatctgatggccgatgcgccggccgcctatgccggttggcgagctggaactttcgcgccggagaacggcgagatctgggccgattttcgtgcccgtgttgcgcgcgcaatcgaaatggcgctcgcggcggaggccgataccattctgatggtttgccacggcggcgtcattcgcgcggcccttgacggcacacttggattggcgcctgcccgcatcattcccgttggtccggcaagcctgaccatccttgcatttccaaagggcgaagcgcggcttgaggtgttcaacacaacggccttcgcaccggtcatagatgcaccggactgacgatccgaagcttcagtggcaggtcggtcaccgcgaaggtgtgcgagaacaaagtcgcgtgatccggactgacgcgcgagctatgctcgtcgattggcgacggcaagcttaacgtcatcaacctgcgcggtctcgccggccttcctgcgccgtcgcgctcagggcttgcactcccatcgcaaggcgcagaaacgaccgatccgccagcttagctcgtcacgacttggtaccctgcctcagcgaaagccttatcaacccattttcggtcattcggtccgtaggcacccgagagaatagcgtccagctgccttgcttccgtcgcggcctttttcgaagcgtccgcgtaaaccgtctccaacatggcgaacggtacgctgaccaggccgtcctcatcgccgatcaccagatcgccgggctcgatgatcatgccgtcgattgcaatcggcacgttgagggagccggggccgttcttgtagggaccgcggtgggtgatgcccgccgcatagaccggaaaggcatgcgctttgacataggcgctgtcgcggatcgcaccattggcgacgacgccggcaaaaccacgcttttcgcaataggccagcatcatttcgcccatcagtgcgttggtcagttcgccaccggcgtcgatcacgatgacatcgcccggctgggccaggtcgatcgccttgtggatcagcaggttgtcaccgggacgggtcttgaccgtgaatgccgggccgcaaagcacgccaccggcatgcatcgggcgaagccgcgggccggccgcttcggtgcgaagcatgacgtcgctgacgcaagcgacgggcacctgcgcgaatttcgcgacgtaatcagcggatgcccggcgcgatggttcaagaagtcgaatggcgttcataagcatgtctcctctactgcttgttttgtttttcgccgccgggatcggtgtgatgtatctgatccgtgcacggcgagttctcgttcctgcctctgtgccgtcgccaaatcgaaagctcggcgcagacagtggtatcgttcagcccgtcaggccgccgtgttcaggtcccggttggcgagggcctgcctgtcgtagtcccttccttcaagcacgccgacaatgtgctgtgccgcatagactgccatgttgcgcagtgcggagcgggcggcagcgcccacatgtggcgtggcaatcagattgggaagcgaccacaagggattgtccgccagtggcggctcgatctcgaaactgtcgagcgcggcaccggcaatgcgctgcgatttcaaggcctcgatcagggcgctttcctcgatgacagcaccccgcgcggtgttcaccagaaacgctgtcggcttcatcaaagccagcctttcggcattgatcagatgatgggtttgcggcgtcagcgggcaatgcaggctgacgacatcggccattccgagaacagcttccaggtcacggctcaccttggtatcgcccgtatcggcggcaaacggatcgtatgcgaccacctgcatgccgagcgcgcgcgcgagggccgcggccctttggccgatttccccaaagccaaccacaccgaatacggaaccggcaaggtcacgaccgacatacttggttttcggccagcttccacccttcaccgcgtggtcaagcggaatgacatccttcatcagcgtgacggtcaggctgatcgcaagctccgccaccgattgggaattggcggcaagcgcacgcagcaccgggatcttgcgatcggtggcggcggcaaggtcgatgttgtcgacgccgctgccatgcttggcgatcactttcagcctcggcgaggcgtcgatcaccgaccgattgatctggccctgccgcacgagaatcgcatcgacctcatgctcgcgcgccattcccgccagctgttccggcgaggaatatgccggcgcgtatatcgcgtccacatggtgcgatatcaaaaaatctctcgcttcttcaacgagttccgccccggtgaccatcacccgggcctgccgcttcgccggcgatcggcttgctgcgcccatatgctcctcctgcattcagatcagcgtttactgacgaacgggcgtcacccgttgacgaatgccatttatcgcgtattgtactaattgaaaagatgttgtactcagtacaacgaacaacatcttttttgggaggagcccatgcctggaaattcaaacggcgtcgccgctgtcgagcgcgccgcgtctttgctggaagcattcaccgagcgtgatttcacgttgtcgctcggcgagctcgcgcgccgcgtcgagctcgacaaatcgacggtactgcgcattgcccgctccctcgccaaacaccagcttctcgtacgcaacgaggacgccagctggcgtcttggcccgaagctcatgaagcttggcaatatctatcagtcgaccttccgcgcctctgacatcatcgaaccgctgcttgccgatctggtcacccggaccggcgaaagcgcggccgtttacgtgcgcgagggggatgaacgcgtttgcctgttcagacatgattcccatcagtcgatccgccattcggcgcgtgtcggcagcacctacccgctggatcgtggtgcgccgggaagggtcatcctggcattcaacggccgctcgggcagcatatacgacgagatccgcaaggccggatttcataccacgtccggcgaacgcgatccgcaggttgcaagccttgccgtaccgatcttccgtgatggccagaacctgttcggttcgctggcgctgaccggcccgccggatcgcttttcggacgacgcaatcaggaaaaatcttgagattctccaggtggccgcacggaagctgtccgtggccatgggaggagaccccggaccataaggcgggaaccgggcccgccatctccaacggaggattggatatggagtaccgcagtataaagctttctctcgcagccgcggccttggtcgcgtccgcgtcctacgcccatgccgagtggccgaacgatcgcccgattcaaatgatcgtggcattcgcgccgggcggcagcaccgatgtcatggcgcgcgccatcgagccgttcctggaaaaggaactcggcgccgatatcgtgatcgaaaaccgtccgggtgcttccggtgagatcgcctatacggcgctcgccaaggccaagccggacggctacacattctcctacatcaacacgcccggctatctgtcgatgcaggtgcagcgcaagctgggttatgatccgaagtcgatcaagccgatcgtgcgcatcgtcgacgacccgacagccatcgtcgttccggccgcctccgagatcaagacgctcaaggatttcgtcgaggcttcgaaagccaagcccggttcggtttcctacggctcctccggcattggtaccgacgaccatctcgccatcatcctgcttggctcggccacgggcacgagctttacccacattccattcagcggtgccggcgaaacccgcacggcgatcctcggctcgcaggtctccggcggcggcctgaacatcagcgaattcgcaggcaacgatacgtcgggcctgcggatgatcgcgcatttcggtaccgagcgctcgccgcagttgcccgacgtcccgacggccaaggaacagggcttcgatgtccagatgacatccgagcgcggcatcgccgcaccacgcgacttgcctgatgacattacccagaaattctcggatgccatgaagaaggttctcgacaatccggacttccagaagcaggcaaagcagcttgccctgccgctcgcctatctgtccggcccggattgggaaaaagagatgcctgaccgcctggcccggttccagaaaatctggaacgaaacaccctgggtgcaatgatgaccggcgcctccatcacgaaacgggatcttcccgatattctggcaggggcattgatgatcggactgggagcgctgggcctttgggccgggcgcgacctacgcttcggctcggcggcgatgatgggaccgggattcctgcccgacgtcatctgcggcatgctcatcgccatcggcgcatatgttctcatcaaggccttttccaaggcctatgagcccatcggcgaatcaaacatcaagccgctgatcattctcgtcatcgctatcgccggcttcgcattcatggcggagacgctcggctttgtcgtttcgacgatctggcttctcgtgatcggcagcctggcggatcaggaatcacgctggcgtgagatcgcgatttccacgctgctactgacagtctttggtgcgctcgtcttcatctacggcctcggcgttcagatgccgatcctgccgttctgatcgagaccggaaggaactcccatggcatttatcgatgtcctcatgctgggctttgccgaagcattcacaccgaccaacctgctgttctgcttcatcggggcgctgcttggaacgctgatcggcgtactccccggcattggccctacggcgacggtggcgatcctgctgcccgttacctttttcctgccgccgctcggcgccttgatcatgctcgcgggcatcttctacggcgcccagtatggcggatcgacgacggcgatcctggtcaacctgcccggcgaagcctcggccgtggtcaccgcgattgacggttatcagatggcgcgaaagggccgcgcgggcgcggcacttgcgatcgccgcacttggctccttctttgcaggcacggtcgcgacgatcggcctggccgtcgcaggtccgactttgtcgtcattcgcgctctccttcgggcctgcggaatatgtggcgctctgtatcttcggccttctcgccgcgacgattcttgcccacggctccgtcgtcaaggctatcggcatggtctgcctcggcctcgttctcggcatggtgggtatcgacgtcaacagcggctcgacgcgactgacattcggctcgaccgaactttacgatggcatcgacttcgtggtcatcgccgttggtctgttcggtgtcgccgaaatcgccagcaacctcgagttcaaggaagcccgcggcattctgcagagcaccatcggccgtctctggccgaccaagcaggaattcaaggaaagctggcccgccgtgcttcgcggcaccgcggtcggcacgatcctcggcgtgctgccgggtggcggcgccacactcagcgccttcagcgcctattccgtcgagaagaagatctcgaagacaccggaaaaattcggccatggcgcaatcgcaggcgtcgcggggccggaatcggcgaacaatgccggcgcgcagtcgtccttcattccgctcctgacgctcggcatcccctcgaactccatcatggcgatgatgctcggcgccatgacgatccacggcatcacccccggtccttcggtcatccagaatcagcccgaactgttctgggggctggtggcctcgatgtggatcggcaacgccatgctgctgatcatcaacctgccgctgatcggcatctgggttcgcttgttgaaggtaccctaccgcctgctctatcccgccatcctgctgttctgctgcattggtgtctacagcatcaacaaccgcggtttcgacgtggcgctcgtcatcctattcggcgtgctgggctatgtgttgcgcaaggcgaaatgcgaggcgggaccacttctgctcggcttcgtgctgggcccgctgctggaaaccaatctccggcgtgcactcctgctttcacagggcgatccgatggtcttcgtgcagcgcccgatcagtgcggccctgttgctgatcacggccggcatgctcctgacgctgatcctcccggcgatccgcaggggacgcaaggaggcattcgaggcaagcgaggactgacgccaccttttggtgaacatgtcgatgcgggccggacgagctccggcccgcatcgacggctaccgaccttccaatgacccgccgagagccgcaccatgacggacaagctcaccacgcgacgcccgcggcgtcgtctttccagtatcctctgtctcgatgatttcgagatcgcagcgcgccgccacctgccaaagccgctattcggttacatcgccggcgccagcgagaccaacgcctcactagacaacaaccgcaagtctttcggcgcatatgcattccagccgcgggtattgcgggatgtttccggccgcagtaccgagaccacgcttctgaacgagcgcttcgccgccccttttggaatagcgcccatgggcatcagcgcggtgatggcctaccgtggcgacatcatgctggcacgggctgccgctgagagccgcattccgatgatcatgagcggctcctcgctgatccgtatggaggacgtggccaatgccgctcccggcgcgtggtttcaggcctatctgccaggtgagccggaacggattgacgcactcgtggaccgcgtcgcggctgccgggttcaaaacgctggtactgaccgtcgataccgccgcactcgccaacagggaaaacaatatccgggccgggttttcgacaccgctgcggccgagcctgcgtctcgcctggcaaggcgtttcgcatccacgctggacggccggcacgttcctgcgcacgatcgtcaatcacggcatcccccatttcgaaaactctttcgccacccgtggagcgccgatcatctcgtcgaacgtgatgcgtgatttcggccgaaaggatcatctcaattggtcgcatctcgaacagattcgcaaacgttggggcggcaacctcgtggtgaaaggtatcatgcatccggatgacgccgttcaagccgtccagatcggcgcgaacggcatcatcgtgtccaatcacggcggtcgtcagctagatggaacggctgccccattgcaggttctgccagcaatcgtagaccgcctgaacggcgccgcgcccgtcatgatcgatggtggatttcggcgcggcacggatatcatgaaggcgctcgcgctgggtgcgaaattcgctttcatcggcagacctttcctctatgccgccgcggtcgccggcatccccggaatcaaccgcgccatcgacatcatccaatcggaactgcaccgcaacatggccttgctgggtgtcaccagcgtggacgcgatctcgggcgatcatctgcgcacatcgaactgataggcaggcggcaggcggccaaaacgcaagcgggccgcccatcgggcgacccgcgacgcggtgacaacgtcctgttcgcctcacgaccgcaacatgctccccggctcgacctatcagccgtcagcctggtccgtcgggatcccttcgggacgcgaaagtcgtctctgcgccgcaattcggaatggagcgttcattgccccatagccggcgtaagcacctcgccgttcgatgatttcgaagaagaagccttcgccgaatgtccggctgtagatctggaagtattcgccgttgtcgtctcggtcgtagagtattccggaggctcgaagtgcatctgaaaattcgggagtgataccaagccgcgcttccaggtcgtcgtagtagttgcgcgagatgggaagcggctgaaatccgcgatcggcgagcatgcgggccgtcgcgaagatatcgtccgtcgcgaaggcgatgtgctggatgcttgttccaaatccctcggcaaggaatttgccggcaaaggtctttcgattgtccgcgccgttcatcgtcagcctgaagcccggttgcgtcagcgcttcgatggcctggctccggatgagcccaccgggatcgacgacatcgaccatgggcgagcgcctggtctcgaagatcgacgtgtaaaacagcagccaggtgagcatttcatcgtaccgcgtggtctgcgcgagatgatcgacccgcttgagaccggcatcgatgccgatgtcatcgcacgtcaacgggatgaactcattcttccagatcgatctcagatcctcggaatcatcgaggaagtagataacgctgtttccgaccccctggatggccgggaccgagacttcgccatcaagacgtggttcggaaaatgtcgaggcgccgagaagtcgggcacgctcgacggctgcctttgcatcgtcgaccttcattccatacgcataggcgtttgtgccgtgtacggtgtacgaagcgctggcgaaggtttctcctctgacgtcggtattcacgacgattcggattccggcctgcgtgaacaggtccacggaccggttgcgatgtctggcggctttcttgaagcccagcgttgacaggattgcttcgagctcgggctgttgtgtctcatcggtggtgaactcgagaaattcgacgccttcggcccgaactcgattgggcatgacgtgatcgtcggtgcgaatgtcgggttcctggcgaacgacctgatccatgagatagaccagagagcgatggccgtcttcggcgattgctcgggcggacccgccgcggaactggtcgttgaaaatctcgagggagagcggaccgtcataaccggtggcagccaccgccgacataaagtcgaccacgggcagatcgccttcgcccggcatgtttcggaagtgcctgctccaatacaagagatccatgtcgatcatcggagcatcggcgagctgaacgatgaaaatcttgtcgccggggatcgagcggatcgtgttcgggtcgatcttgcgggagagcgtgtggaagctgtcaaggatcagaccgatactcggatgatccgctcttcgcacgatctcccacgcatcacggtgatcattgacgtggcgcccccaagcaagcgcctcatatccgacccgaacgccatgctcggcggcgagttctcccaactgacgaaaatccttcgcggcacgatcaatgccgccaagagagattggcgacacgttcgagcagatcaacatcaagtcggtgccgagctcgcccatcacgtcgaatttgcgcttagcccgctcgaatgcgcgggcgcgatgcggctcgggcattccctcaaagtcgcgaaagggctggaagagggtgatctccagcccatgatcgcgcaccatcgcggcgacctctcgaggagaagcatcgaaggtcagaaaatcgttctcgaagatttcgacaccggtgaaaccagccttggcgatcgccgcgagcttgtcgggaaattcaccactgatggaaacggtcgcgatcgaggttttcatttgctgtctcgacttgcgttgaatttcgagatcgcgccgcggagcgccagctgatagccgtcagtccccatgccaacgacgatcccatcggcgcgatgcgagacgaacgagtgatgccggaagctctcgcgtttatgcacgttggaaatgtgtatttcgatgaccgggccctcgaaggtgttcaaggcatccaggatcgcaacggaagtatgcgtgaacgcggccggattgatcacgatggcggcgccgtcttctcgcgcctcgtggacccagtcgatgatctcgtattctctgttgctctggtgaaagcggatctcgaagccgagttctttcgccagcgcttggagctcgacctcgacatccgcgagagtcttgcttccgtaaatatgcggctgccgttttcccaaaaggttcaggttcggtccgttgaggatgtagattacaggcatctttttcactcccttgatgcaaagtcggccggaactggtccggccgatgttgtcatgctgctatctgctttgccgcgtccgcgaagctctcggcgagctggtgcatcaccgcctcgctgttgcgggccgaaatgtaatgcctgccataggtgctgaacatcgacattacgcctgcccgccgaagagcgatgtgcatgtcggcggtgaaggacggatcggccttctgaaccgcctcctggtagtcggcaggtggttgcccgccgcgccagagggtgaagaccgttccgtacccgctcgtcgtgacgtcgaaccctctttccgcgaacgatgagcggatgctttcgcgtagcgcatcgccagattgacgaagacgctcgtagtcgatcgtgtcgatgatctccatcgatgccttgaccgcagcgcaggcgacgggattgccgttgtaggtgccggcgcgcccgacacgctgatcttcaaaggccgacatgatatccggccgtccaaccagcgcggcgaccgcatagccattgccgatagccttgccgactgttgccagatccggtgacacgcccaggaagtgcgaggcaaggcccgcgtggacgcggaagcccatgagaacttcatccatgatgacgagagcgccgttccgccgcgcaagcgagacgacgtgctccaggtaacccggcttcgcgacgacgcatcccgcatttgccatcatcggctccaggacaatcgccgcgatgtcgtcgcactcggagaagagaagttcggcgtcggcgatatcgttgaaccggagcagcaacgtgtcgccgctgctcgggcgaatgttcgtccccataagagcctccggggagccggcattgccaaaggcaacgtcgtcgaaccagccgtcatatcccgcggccatcttgacgatcttcctcttgccggtcaccgcacgcgcggtccggcaggccagatgaaccgcctcgcttccggagttcaggaagatgaccttgctgagatccccggtgtgagctgccagcgtcgcggcagcatcctcttcgagtgcgtgggcataagcaggcatggagccgcgttccatcgcaacgcgcacagcttccgttacttgcgggtccgtgtggccgagaaacgtcgcgccgaagccgagagcggtatcgacgtactgccgaccattctgatcccagacataaggtccctgggctttgtcgacgaggaaccgttctccgtccagctcaggcaccacccgacccgcgctggagattccacagacaagatgttgcattgtattaaactccaaatagcttcggaagccattctgtcagctgaggaaaggcaaccagaccggcgacacagatgacgcttgcgatccagtagggaacaagccaaaccgataccgaccacatgtcgagtttggcgacgttgcacacgacgaagatgttcgtaccgattggcggggtgaagagaccgatacccaacgtcatcgtgaacacgatccccgtctgatatggcgtcaatcccgccgcgagagcgataggaacgaggatcggcgcgagaatgatcagggcggggccgaggtcgagccagaagccgacgatcttcagcaggacaaggacaagaatgatcgtgacgatcgggcttgtgtccaatccggtgatccacgccgcggcgttggcgggcacctgctctacggtcaatatccagccgaatggcgttgcaagcgccatgatcatcatgatcacgcctgtcgtcgccaccgccgccgatgcggcggcataaagcgaacggagcggcagttcgcgataaacgagaattccgacgaggaaggagtagacaactgccagcgccgacgcttcggtcgcggtggcgataccaccgatgatcgatccgaggacgagaactggcatcaggagtgccggcaaggcgccgacgatgtccctgcctatctcgccccacgccacgggaacctcgtttctcgggaaattgtgccgcttcgcaacgatatacgacgtgatcataaacgtcgctgcaatgaaggcgcccggcacgagagcagcaaccaggaggccaccaatggacgtgttggtgagaacgccgtagaggatgaggatcacgctttgcggaccgatgatcccgagagttccagacgccgcggttacggcggcggcgaacgccttcggatagccgcgctgtgccatcgcggggatcatgatcgagccgacggcaccggtatcggccgtggccgagccgctgatgccaccgtaaaccagcgcagttgctacgttgacaagcccgaggccgccggtaattcgaccgaatatgtgttcagcgacacgcatgatgcgcgccgtgagcccgccgcggttcatcaattcgcccgcgaagaggaagagcgggatcgccgccagagttatcgcgtcggcgccgcgtagcgtctgctgcgcgaaccacgccgtgggcaagttgaggccgccggcatagatggtgatgaggctggcaacgcccatgcaccatgcaatcgggacgccgatgagcaggaggaaggtaaaactaacgatgagaactgcaacggtcatgtccgcacctctttctgtcgcttcgcgaagacagtgagagccagcagccttctggcgccgatcaccaacgcgccgatcccgagtacgagaacggttgcggtgatcacacccgtcggcatgcgcagcacggccgtcgggaccattgcggagcgctgccatacggcaagcccgctgatcagaaacgccgcgcccatggtgacaagggccaagacggaaatcagatccaacacgcgcttcaacccagccggcgcggcgtggttgagcgcttcgaaggcgacattctcgccccgcaattcagcgttcaacaggccaatgaaggtgatccagatgaaggcgatgcccgccacctcgaacgaccactccacgccaccgaactcgaagtagcgtgcgatcacgccgagcagtgtggagaagaacatgacaacgaaggaaacgacgcccaacaactcgagggcgcgcgccaccgggccccgccgcaacggcggggcagacgtttctaacggctccatgggttcaacctcagttcgccgacgcggctttttcgaccgccgacaccagatcagcgccccattccttggcgaactgggcgtatacgggctttaccatcgccgagaagggagcggtatcgaccttggtgacggttacgcccttcgattccagcgcgctctgggtttctgcgtaagcgcggtcgagttcgcttctgtaccaggcgaccgtatcggtcgctgccttgcggatcgccgcctgttcttccggcgccagctgatcgaaccgatccttgttcatgaaccaccagttggcggtccaaatgtagttggagatggtgagctgctttgcgacttcataccacttggaatcgtagtaatcgcgcatttccggctcgacagccgcgacgacatgcgactggagcgcggtatagacctgaccgaatggaatggactcggccagcgcaccgaactgcttcatcgttgcgagaattaccgggttcggaggcgtgcgaattttgacgccggcgagatcggccggcttttcgatgggcttgctggtcgcgaactggcggaagcccgaatccagggctccgaggatcatatagccacgatccgcaccaaaaccctggacggtctggccttgctcgctgtccagaaacttgtgaacgttcgccgcgtccttgaagagaaatgggagcgacaaaacgttgagccgaggatcgattgcatcgatcgaaccgcccaggccgatatcaatggcgccggctccgacgccatcggcgatcggcccttcgtcgccgagctgaccattcgggaagatctggaccacgacggatcccttgctctcctccttgacctcggcggcgaacttctcgacggccttgttgatcaagctttccggcgaagaagcgtgcgcaagacgaagcgtggtctcagcggcagcggtggtagcgaacgcgcacatggccgagccggccagaagtgctgcgacaattgtagaagtgaatccgagtttcacgttgttcccctgtttttggtgtcggtagacctctagaaacataatcggatgatcgtcggacgaaaggagagatttcttatcgatgcataagcgtcactgatctttcacaaaatgcccgcggcgcgtatagtcacggggcaaacatggcgtggtgacatgagaaatctcgatagcgatgctttggccgcttttttggccgtggcggaaaccggcagctttaccgcggcagctgagaggctgggacgaacgcaggcagcggtcagcatggccatcgccaaatgggaagagaaactggaccttcgtctgttcgatcgagcgcataggcgcgtctccctcaccccaaccggagaccgtttgctggaatatgcgcgtcggatcagagcgatagaggacgaagccctggcaatgctgctggaagggcgtagcgagagccgggtgcggctcggaatgccggatgactacctgacacttttcggcagagcgcttctcgatcgctttgttccgcgccaccccaacgtcagtctggaccttaggcacgatttctcccatcgattggagcagatggtggatacgcgggatctggacatcgcaatcgtgacccaaggcctgtccgaagcgaaaggcgaggttatccgcgaggagcgccagatctggtgttgcgcgccttcgcgttcacccgagaccgcaaccaacctgcatctggcgctgtttcccgagggttgccgcgcacgtcctcacattctttcggcgctcgacaaggttgcgaggacctggagggtcgtctactcgtcgtcggacatagcgggcatcaaactggcggtggcatccggtgacgtgttgaccgttctgcccgaaagcgccgtcccggaggattggcgtcgtcttgacgaaagtgacggacttcccgccttgccgcttcttcggctcgcaatgatcttgccgatgcatccacgcctgccggttcgacagcttgcgtcattcctcagatctgaatttcagtcgccctaccagcagcttcatgtagctcaagccgtgtgatcttccgtgtcgatctcggtcgatgacgtcaagccgcgaccggcgtcgcacgcctatatcgcgacgacggcggcatccgttactgcaccgccgatcttattgcccgcagaagcaggtccattggcaaggaggacattgcacccgctctcacggtgaggcctaccgggccgcgcgtgtcgccagtgtcgattggaagagctgcgagaagtccgtcggcaatatccccggcgaccactccctccgagataatccacacggcatcggttgcccgaaggaacgaacgaccgaaagcgtccgacaccgtctcaacctgcctcgttgagagagagatcccgttggcgatcagaaactgctcgacgatcggccgaatgactgaatcgcgagttggcatgagcatcgcaaatgtcgatagaccggcaaatacgttcgctccaggggcgagaagcgggtgtccggcgcgcacgacaaaaaggacttgctcggaataaagatgttcgaacgatagaccggtcatcttctccgcggacgcgagccgcccaacgacgagatccaactcgccgatcttcaattgctccaggagcacggaattttccccggtcacgattttcacgggggttcgcgtatcttcggcaaggaaacgcgacatggccttgggcatcacccgagccgatacggtcggtagcgcgccaacacgcaatggcggcccggcctgttcgaaatccggagaaacggcatccagtgcctgtcgcagagcggtgagcgttgccccggcgtgcctgagaaaaacctcgccttgtgtcgtcggccgaatgccgcgcccatcacgctcgaaaaggggaatctgcaagacgtcctcaagttcgcggattgtcttggtcacagccggctggctgatgttgagagcttcggcggccattttgacgcttctgagacgcgcaacctcaacgaaggcgtgcaactgccggatcttaacacgggacttgatcatgctttcataaccaatgggttatttatatcggccattttgtcattttacttaaccacatctcatttgcaataacggtgcttaggcatggaggcgcgaatggattttctggctgtcgacgacatttcgctgcatttccgaattcagaacctgccaacccgcgcgcaagacagacccattatcgtgttctgcaattcgctcggcacggacttccggatttgggacgaggtcattgcggccatgggcgatgagtttggctacgtgctttacgaccaacgcggacagggattgtcgggggtcggcacaacgccatactcgatagaaagtcatgcggaggacttgataaggctgctcgatcatctggaactcggcgacttgatgatctggggcttgtctgtcggcggcctcattgcccagtcggtttatgcgaagcgaccagatctcgtgcgggcgctggtgttatcgaatacggcacacaagatcggcaccgccgagacctggaacgcgcgtatcgatattgctcgcggcggcggcctggcggcgctggtcgatccggtcatggagcgctggtttacgcccgcgtttcgccggccggacaacgccctttttctgggatgccgcgccatgctcgcccgtcaaccggtcgatggttactgcggaacatgtgaagcaattcgcgatgcggatttcagcgatgtgtctgcccgcatcgccgtcccaacgctctgtgtcgcgggcgaccaggacggcgcaactccaccgccacttgtccaggagtgcgcgaacctgatccctcattcccgctatgcggaaatctcggattgcggccatattccctgcgtcgaacaacccgcgctctacgccgctaccgtgagtgcctttctcaataatttgtcggagctcaattgatgacacacggtggcaaccaagccgatcgctacagcctgggcatggcgacgcgccgctctgttctgggtgatgcgcatgtggaccgcgcaacggcccaggcggacgacttcgaccaggcgttccagacgctgataaccgagagcgcatggggaaccgtatggtcgagcacgcagttgacgaaacgggagcggtccattgtcaccattgcgcttctggcggctctcggccaggacgaagagctggcgatgcacgttcgcgcgacaaccaacaccggcgcaacgaaggatgatatccgtgaggcgctgatgcatgtcgccatctatgccggcgtaccggcggccaatcatgcattcaagatcacaaagcggacgctcgccgacatgagtgacggcaaagacgagaacaggagctgacatggctgatcatccaccggaaactgggccattcttcgcgcgcgaccgggcgacacagccgccagcccatactccgtggtataaaacgagcattctgcggtcgccccagcgggcgctgatctcgctggatggaacgaagagcgagatcaccggaccggtcttcggccacggaatgctgaatgcgctcgacaacgatctcatcctcaactacgcccgccccggcgaaatgccgattggtccgcgcatcctggtgcatggccgggttctcgatgagcgcggcctcggcgtggctggcgcgctcttggagttctggcaggcaaatgccggcgggcgctaccgccacaaaaaggaaacctacctcgccgccatcgatccgaatttcggcggcgtcggccgtaccatcaccgacgagaacggctactactggttcaagaccatccagccgggcgcctatccctggccgaacggtgtaaacgactggcggcccgcacatattcatttctcggttttcggacatggctttgcccaacgcctgattactcagatgtatttcgaaggggacccgatgatctggaactgtcccatcgtcaaaaccatccccgacgagagcgcgatccggcagctgatcgctccgcttgacatgaatgccacgatcccgatggacatgcgtgcctacaggttcgacatcgtcttgcgcggtcgccgctcgactttcttcgagaaccgcccggagggcaactgagatggttcaatcactgtcctacctcaaggaaagcgcttcgcagacggccggcccctatgtccacattggctgcacgccgaacttcgcgggcataaagggggtattcgagaaggatcttggttccggtgcgctctatgacgagcagacgcagggcacgcgcatcaccatccgagggactgtctatgatggtggcgaaaatgcgctgaaggatgcgctgatcgagatctggcaggcggacgctgccggtctttacaacagccccggcgagacgcgcggaactgccgaccccaccttccttggttggggccgctcgccgggcgacatggagactggcgagttcgttttcgagacgatcaaacccggcagcgtgccgttcagagatggccgctggatggcgcctcatgtcaccttctggatcgttgcacgcggcatcaacatcggcttgcagacgcgcatgtacttctccgacgatgaggccgcgaatgcacaggacccggtgcttgcccgcattgaacacaaggcccgcatttctacgctgatcggcaagaaggaaggcgacagcacctatcgcttcgacatccatctccagggcgataaggaaaccgtctttttcgacatctagaggattgccagcgaaatcatgagtgtatgcgcatttgaacacccgatcctgtcgggcctgctcggtgacggggagcttgcagccttgtttgacagcgaggcggatattgccgccatgctgcgcttcgagcttgctcttgcgcaggcgcaagccgaatgcggcgtgatatcgaaccaggacgccgagaacatcgcatcggcgattgcgaaattccggctggatctttccgctcttcgggcggctcttgggatcgacggtgttgtcgttccggaattggtaaggcagttgcgagcaaccgtcggccagccaagcgacgccaaggttcatttcggcgccaccagtcaggacgtcatcgacagcagcttgatgctaaggctgaaggcagccgccaacgttctcgtcagacggcttgcggcagttgccgacagcctctccgcacttgtccaacgcgacggtcaccgctcgcttatgggttacacccgcatgcaggcagcgatcccgatcggcgccgccgatcggatcatgacctggcaagcgcctttggaaagagacctgtctcggctctcggtacttttggaaacgaattttgcaattcagttcggtggtgcggccggaactctcgaaaaacttggcgacaagggttcggccgtgcgggccgcgcttgccacacgtctcgatctcgttgacctgccgcagtggcacaatcagcgagatttgctcgccgagttcgccggagtgctctctctgatcacagggacccttggaaagttcgggcaggatatcgcgcttatggccgaagtcggcggcgagatcgtgctggcgggcgggggtgggtcctcggcgatgccgcacaagcagaaccccgtggcagccgaactcctggtgacgcttgcgcggttcaatgccgcccagatatcagccatccatcattcgttggtgcacgaacaggagcgctccggctcagcgtgggttttggagtggcttgtcttgccgccgatggtttcagccacgggcgtggcgctactgacggcggaccgtctcctcggacaaattcagatgattggccgaggttccgggggcttgatcgacgacagcggtatctagcgccgcgacgacggattcctgcgtggccggtcggccaccacgttcatcgtcgcttgctcgtggcaagctgtagatactgtatgcacccccaagttcggccataccgcgaagtaaactgtcaattgccgaccggaaaatggaccgcatccgaagtggcttcccgcgttcagttctgcgtaggccagattgatcgcgcgatgacgtccacctgccgtcgagaaaatttccacacaccatcaatccgcagatagctgtcgtcataaacgatctgaaaggtgtgacatgccccggactggtacctgtcgccgatgtggctcacgttcagaaaatgatgggcggtgcaatacaccgttccggtggccgaatttccattgagctcgacaagctgcgttgaaacgagatgctgtgttttcgaataccgcgccagttgtacggcaggcattctgagaacctcgcccagcgatcttggcggtgcggcgccactcgtcaggatcatttcatcgcaaaacaaatcccgccacatagcgtcattgcccgtgtccaacgctactgcatagcgatgggacaggcttttgactttctctgtctcgatgatgggatcttcaatcattgttcttgttcgggaagatttcgaagtcgttgctgcgcttcaatatcctcgtaatgctcgtggtcgacatttgctgacatcccggcaacgaatgtatgcgccggatcaactcgtaggcatcgaccctggtacgggccactcccgccgcgcggatgtcgaaggttccgatacagacgccgacaaagatcatctgctccatgtcgttcagctgctcggccatttcctcgagatggccggacttcacgatgatatcgaaattcagatagtgatcgtagcccgccatcagcgggttgatccaggcgccgaaccggattgccttgctgttctgcagcctcgccagtctcttgcgaacggtcgcttcggaaatgtccagctggcgcgcgacgtcggtgttctgcagcctgccatcgcgtcgcaatatattgatgagtttcgcatcgacatcgtcgatgatcacccgtgcgccctcgacttccgcgggatcgtccttatcgttctggctcactcgtcttttcctcatggttgggttcatccctgtcgtttgacgaacccggtaatgcttgtcgagcaccaaataccggctttgtggaagggatcagctcgattgaaactttcgaccgcatcttttgaagccgcctcgacgacaaagagactcccgatcatagtctcgcttacgtcatcgatcaaagggcccgacatgacgatcttcacgccgaaccccgatgtatccgccagaaatgccttatgcgcgtcataatgagcgaggcggttgtcaaggctgccttcgtgatcgagggcgtggataacgtagagcattgattttctccttagacccgagccggttcagcaagacccgagcgccgttcgatcgacttgacgatcgcgatgaaatcctcgtcgccgagcccctcttcgaccagggcggagaatgaagaccgcacgagccttgcaatcggggtgaccacgttcgacgcttccgcggcacccacaaccagctcgaggtccttgagcatctgcttgccggagaatgtcgaggaaaagtcgcgttgcttgagtggcgaaaccttgtagcgcacaaccggcgaggcgaccgcactttcatcgagcagatcaagcatgtcgttccagccgatattgcccgcacgcgcgagcgaaagcgattccgccatcatacccgccgttgtcgcaaccatcagattgagcgcaagcttggcatagcgcgcctcgtcggcgtgtccgagatagcgttgtgccttggaaaagcaggcgagcaacggcagcgcttcatcgaaggccaccctcgggccggaggcgagtgccgtcagcgtgccggcttccgcaagggttgggccgccggaaagagggcaacggagataggcgatcccctgttgctcgcacagacttgccaaggctgcggacgcggccgggctgaccgtgctcgtctcgatcagcgtacttcctttcgccatgctgcccagcatgccgccgtcaccaaagacggcctgtagggccccatcgtcgggcagggaactgacgacgaagcggctcccggccgcttcctgcgcgaaatccgtgccgatcttgacggatcgctgctttgccaaggcaaggcgctcgggcgaacggtcataagccaccaccgcaaatccacccgccacaagccggcctgccatcggcaacccgagcttgccaagtccgatccaggacacggtcatagcgatgctccttcgacggttttgtcgcaagccaggccattcggatagctgaccaactcgagttgcatgccccacggagcaagaaaatagatccaggtcaggccggcggaagggccttcggtcattgtcacaggtcccttcaaaaccttcacggaatggtcgcgaagatagcgcacggcggcatccatatcttcgacatacaaaccgatgtgacttgcgccgaagtcggagttggcggggatatgcgtcttctgatcgggcgcctgatactcgaaaagttcgatcatcgtgccgttaccggtatcgagcatccgcaattttcgaatgacgctgcgcgggtgaacgagaagatagtcctgcatccagtcgtcatccgcaatgaagggaccgacatcatacagaaccttgcagccgagcatgccggcgaagaaatcggtcgcctgctcgatatcgggcaccgttacaccgatatggtccattccacgcctgccgggtaagccctgtttcatttctctacctcccttcgaacatgaagggcaggcgcgtgaagcgcctgcctgagtgatcacttgacgcccgatggatgggcgctttccatgtcgtagaaggtgatgtcggcatccttggtcaggtaggagaggcggttttcccaaaatcccttgagatgcggcgtttccagatgttcctcgaaagccttccggtccttccagttctcgtagaacatgaaatgaagccgatcgtccgaagatcgatggaaatgatagtcaacgcagcccgcctcctggcgggtaggcgcggcgaaggcgtgaagcacttcttcaagctccgcagctttttcgggcttggcgtgaagatgggcgatgagtgtaagcatgagttcctcctttggttgcatttcagcccgtttcgggcacagggagtcctggccgccggccgctcgggtcggcggaaacattgtcgatgcagttggatgggcggtgccggcgaactacttcgctggctttggctcggacttcgcctggtactgagcgccccatttgttcagtatgcgatcgcggttgtcgttgccccacgcaatatcgatcttcaaggcgcgctgatcgccgttttcaacggcattgggttggctgcttttgataccgtttcgcgccacgattccgtagtattttgcgtaggcttcgttcgccttctggctgatcgagaaatcgagaagcagtttcgcgagttcaggcttcttggaaccctttggcagggccgacgcctcgataccccagcccgttccatcggacggcaccagcagatcgatcggcgcgcccttcgacttcagcggcgaggcgttgaagtccgtcgacaggcccacgacgtattcaccggcggcggcctgcttgcagggcgtggagctggaattggtatacgacgccacgttcttattgagcgcgtcgatataggtccaggctttgtcctctcccatagattggatccaggccatgatgtaggcgtaaccagtgccggacatctgcggactgggcatcgtaatctggcccgcgtaaacaggcttcgtcagatccgcccaggattccggcttgggaataccgcgcttttccgcttccaccgtattgaagcagatcaggttcaggaacatgtccagaccggtccatgccggcggcttgttgaccgcatcaacgaaaagcggtttcagctcctccactccctttggcgagtagcgctcgataagacccgcctggtcgagcgtgatgatctcgggaacaggcaggccccagatgacatccgctttcgggtccgccttttccgcgataatcctcgcggccagcattccgccagcctcgcgtacccagttaatctttacgtctggatacgcctcgttgaaggcggccgcgtaaggtgctaggaccgacggcagcagcgccgtgtaaaccgtaagctgaccggaaggctgctgagcgaaaccggaaccgccggcgccgatcgcggccaggcatacgacgcctgccatcaagtgcttcatcctgcttttcatgcttgttctcctccacttcgttatggttttcatcgatgcgcctgccgccatctctgcgtatgggtcagcagatatttcgtgaccacggtttggcagagcttcacgatggcggacgtcaacaggatcatcaccgccatggccgccgcgtaggcggtgtcgccggtgtcgtccatttcgacgaccgcgatggaagcaagcttgccgccgggtccgtagagaaagatcaccgctgcaactgttgtcatcgcattgacgaagaagaacgtcgcgatgtcgatcaatgccgggacgcagatgggtagcgtcacccgccacatcgtcttccagaacggcgttccaagcgcctcggaggccgcttcgaattcctcgtcgagttgcctcaaggcggtgaccgccgtcagatgcggaacggtgtagtagtgggcaatcgtcaccatcaccaggatggcggttgttccgtaaaggaaattcaacgggttgctgggcgagttgaagaagaaaatatagccgagaccaagcgtgatgccgggtatcgcgatgggcatcatcgcgaaaagctgcatgatgccacggagcgcgaaaggcactttcgtcttctccgccagatatgcgccgacgaacaccaccgccgtgccgacaatcgccgtccaggccgccatccgcaaactattcacataggatgaccatccggacgtattgacgaccgagaagtcgtaattgccgagcgcaagcgtcagatcatagggccagaatgtcaccagagaggcaaaaatcgccacgccgattatgaacaatatgatggcggcaacgatgaccgtgaaagccgtcacggctatatcggtcaacgggcggcttttcgggcgcagaagcacggaccgggcgctcagttgcgacgtctgaccgcgcctggccaagcgttcaatggtaaaggtcacaatcgtcggaagaataagcagtacaccgataaccgcacccagctggaatttctgctggccgataatctgcttgtacacctcgatcgccaacaccgaatattgcccgccgatgaccttgacgataccgaagtccacgatcgcgatcgtgaacacgaccgccgccgcattgaccaggccgtaacgggcggcgggaagcgtgatcgtccgaaacgtacgatagggcgaggttgcgagcgtttcggcgacttcgtaaaggcgggcatccgagttcgccaaggccgtcgtcaggatcagcgtcgcgaagggaaaggcgtagaaaacctgcgccgtcacgataccgatcggcccgtagatactctggccctgcagagcgtaagtcagaaaaccctggttaccgaaaatgtagatcagagcgatggcaggcagcagcgaaggtgccaggatgggcaggtatgcgatgcccttgaacaaggctttgaacggcaagcgcgttcgcgtcaacgcgtacgaataaccgaatgcaagcggcacggtgatcgacgtggtcaacacagcaatgaagaggctgttcacaatcgactgacgcaaagccgggttcgcaaaatacgcctgatagttgctcagtccgacgaaattccctttgtcatcaaacatgctttgagacaggagcgaaaagataggaatgacaaccaggatcagcagcaacaggacacatgccagcatggcaatcgtccggatggtgcgttccattccgccggtgccggaagaggaggaaataacggacacggtcgatgccatatcagcccctctcgacattctgctcggctgcgaaataggtgaagtgttgcgggctaaagatcatccgcacggcttcacctacctgaaaggacagctcgttctgagtgccggcggacagatcgatgatgatcggcgtctttgatagtgcgtccgatgacaccgctacccgatagaaacttccgagaaattcgactttctcaacgcgtcccagcgttccgccggaggttgcccccggtgaagtgagctgaatatgctcgggcctgacgcaaatatcgatggcgccgtccgaaagcttgtcgccttccatcgtggggaacgtattctgggcgatctggatcagcgtgccggatacgttgccgccgatgaaatttgcctttccgacgaagttggcgacaaagcgcgtcgaaggccttttgtaaatttcgataggcgctccaacctggtcgattctgccttgattcatgaccacgatccggtcggccatggtcagcgcctcttcttgatcgtgggtgaccatgattgtcgtcaggccgagttgcttctgcagttccctgatcttctcccgcaagtaaacgcgaaccttggcatcaagcgctgacagcggttcgtccagcaggagaagcttgggagacggtgcgattgcgcgggccagcgccacacgctgctgttgcccgccagagagctgtcttgggtatttctgttcagacccggtgagctcgaccaattgaaggagctccttcacccggcgatcgatgacgtcggcggagagcttctgattgtgcaatccgtaggcgacgttctcgcgtaccgtcaggttggggaaaagcgcataggattgaaagagaatgccgaaatggcgggctgccgccgaatcgccggagatgtcgcgatcacggtgggaaatcgtccccgccgtctgctgttctagccctgcgataattcgcagcaaggtcgactttccgcaccccgacggcccgagaaaacatacgaactcgccttcctgaatatcgagatcgataccttcgagggcggtgaaggctccgaacgccttgttgacgttcttcaaggacaggaaagatggtgcgtttctcgccccgtcagccgacgacgggccggaaacggaatgcaggtccctgctgtcggctccggacgcagttctctcaacagtatctgcaatcacgctcattcctcctcacatcacgatgccgctcctccgcggcaaatatttcgcttacgtccttaggcctaataacttccggattttgcaacaacctcctttgtcggctcccccgtactcctccatccagcagcagcattcaccgactgcttccctccctgagacagaaggcccacatcggaaccgagcggcagaatcgtcacgccctgcgacaccatcgaggcgacttcggaatccgagaccgcaagtccgtgcgcggctggcacgccatgccttcttgccgcaccgaaaatctggctcaaggcgtccgcgacggccggatggttggcaaatggcgtgctgccgatggaaaaggcgagatcggcgggtcccgagcagaccgcatccagcccaggcgtggtcacgatcgcatccagctccggcaaagccttgatgtcctcgatctgtatcatcacgatcagatcgtcattggcacactccgcgtatttggcagcgcccgcgaaatatgaggacgctcgccacggcccccagcctcggatgcccgcaggcgggtattttgttgcacgaaccacttcgctcgcctgctgcgccgtcagcacattgggcacgaggatacccgccgcaccgatatccaggaccctcttgatatggtgaggatcacttcccggcacgcgcacgatcggaacagtggcggatgcttccaaggcagcgagcattgtctgcaaggtaccgagatcgatcgccgtatgttcgagatcgatgaaaagccaatcgtagccgcaagctcccatgatttccgtaaccatcggcgagccgatcgcgtgccaggcgccgaatgtgggctcaccctggcgccagcgctgcttgagacgacgtgctttctgaagaaccgagagatcaggcacggcggctctcccccactgcccggtctttatccgcatcgaccagaacacgcggtttgcgaaggcgggcgcgctcgtattgaggcggatagaacgacttctcgccgagttccgcggcagctcgccagggccagcgcggctccctcaacgcggcccgaccgatggcgatcagatcagccgactgttcggtgagaatgcgttcagcctgcacgggctgctcgatcagcccaaccgcgatggtggggatgtcgcattccttgcggatgcgtgcactgagatgcacctgatatcccgggccgatgggaatgcgctgcaagtcgctgatgcctcccgacgatacgtcgatggcatcgacgccggcagcggcaagctcgcgcgcgatatcgatcgtatcttcgagcgcaaggccgccatcgacccaatccgtcgcggagacgcggacgataacggcacgtcttttgtccagaacgttccgaaccgcgcgaaccacttccagcaggagcctctgccgattttgcagagatccgccatacctgtccgaccggcgattgctgatgggcgacagaaactggtgcagcagatagccatgggcggcgtggacctccacgacatcgaaaccgagccggttcgcgcgcgccgcggattccgcaaaagcctcgacgacgcgatttatctcggcttcgtccatctccacaggcgccggccagtccgggaggtgaggcagagccgatgcaccgatcgtcggccatggatcgtcctcgggcgcgagtggcgaactccccgtcacgaagggccgcgccgcggcccagggcagatggacggatccttttcttccggtgtggctgagctgaataccgatcttggaaggcccgatgccgcgaatgaacgacagaagtttccgaagggcctcttcgttctcatccgagtaaaggcccagatcgccatgcgtgatgcgcccttccgggcttacggccgtcgcttccagcatgatcaaccctggtccggcagcggcaaattggcccagatgcatggcgtgccaatccgtggcgctgccgtttaccgcgctgtactgacacatcggcgagatgacgatgcggttttcaaggtgcaccgcgccgagatcgaaggaactgaacaggtggctcatacgatcaccccctccgtcaccagacgatcgatttcctccggcgggatgcccaggagatcgccaaaaacatactggttcgcgtcgccaagcgcgggcgcagcgctcgtgcgaccccgtttgccgccgatatccttccatggaagagcgatcgtcttgaggtgctcaacatcggggaagagacccgaaccggcttttgtgtgctcgtcgatgacgtcggcgatcgaacgggatcttgccgctgacaggccgttcgagacgagcaatcgttccacgacatccgcatcctcatccgccagccagccagcgaccatcgcattgagatcgtctcgcttcgaaattcgtgcttccctcgtcgcatagcgttcgtcctgaaacagttcaggccgcctcatcagaccgcacagggccttccattcggcatcgccggcaaccgagagcgcgacccaggcatccgcaccagcacacttgaagcatcctgccggcgcgcaatcggcggtacgatttccgccctgttcgcgcgtttccagccccagttgcagccggatgacagattccgggaggagcgccacggtgctttccagcatggacagatcgatatagctgcccatgcccgtgaccttgcgatgccgcaaggcggtcacgatcgccagcacttcccacatcgcggtgaccggatcggtccaggctgggagaatgcccatggattctccacgcggattgggctcaccgatcatcccgacccgtccgctataggactgcagcaaggtaccgtaggcgaggtaatccttttgcggtccgctgcggcccacgccggaggccgagacatagatcatccgctcgttgatacgcttgacgctttcgtagtcgagcccgtggcccttgagaacgcgtgcgctgaaattctcgacgagaatgtcgctcttgcgaataagctcccgaacgatttccttgccctcgggcgtggtgaaattgatcgtcgagcttttcttgttgttgttgacgacggccggccagccctggcgcttgcggtattcgggccgcaggccggactcgaccttgatgacctcggcacccatcgcgcccagcatcttggtggtcattggcccagccagaacccagctgaaatcgacgacgcgaataccttcaaggagtttctcgatcataacgccaaggctccttcacgctgcatttcgtcaacggaacgggcgcccaagacggtctcggcgtccgcaatcgcgccgatgcggatggtccgctcctgctccaggcacttcccatccgcgctgaccatatggaacggcaggccaggtatccggatggcgcggccatccggcaagaccgcgtggtcgaagaagcgacgcgctgcgagctgttcgttcgcaagcagatcgtcgggcgtgttgatcgggaagcagggcacccgggcgccttgcgccatcccgaaaatatccgtcttggatcgctgccgcgaccaatccgacatcagtgcctgcagtcgaagcgcattgcggctgcggcttgcgccatcgccacacaagtcggcgtccccggaccagtccggcgtatcgatgagttcgatccagcgatcccattgatgctgctcgcgaggcgagatcaccacccatccgtcggcacattgcaaaagccagatcaggcctcccgcgatctcgggaccgcggccttccaaccccttgcgggcaaatgttcgatcgcccgcaacccaatcggcgaccggttcgaccagcaaatgcgaatagaagtcggagagcgagaagcgaatatgctcgcccttgacctgtttgtcaccgttggcgatcagggatacggcagcgccggccatggcaaccgctgccgcaagcgggccctcgagatcggctccggcgatgggcggctggctttccggcgaactgacgggagcagcctggtgccaggccaacccggaagcgtgctgcacgatcatatcgctgttggccgcccggttcacatcgttgaacgcggataccgaaacgacatggagcgtcgggcagcttgcggccagatcggccgggacgcccaggacatgcgtgtcgtgcaggaagacatccgcgcggcacagcagcttgacaaggagctcctgcccccgcgctgacgacaggtcaagtccgacccggtgtttctgcccattcagatagacgttcaatgcctcggctatgccacctttcgagcagacggatgatgcctcttctatgcgaacgacctcagcgccaagcgatgccagcagccgtgcgccataagacacgacatgggaacttcccgcttcgacgatccgtactcccgaaaggggcaataacgacatatcacgctccaacgctggctttgccgacggtgaccttttcaccctgctggttttcaagccagacatcgcagtgcatgcgtcctgcctcggtttccgtcacttcacccttggtcacgacggtctcgccggccttgacggtcttgatgaagctgacggcaatctcgccgctttcgagatagcgcttgccgaacgtggcgatcatcatttcactcagatagccggcaagctgcccgccctgaacgatggcaccggagagaccgaccttcttggccgcctcctcatcactgtgaaagtttccgtcgccggaataacgggtcatccgcggcagatcgatcgtctttctgatttctgcgaattgcatggggctctcctattccgccgcggcggctttttcggccaacatcagctgggtccggcgatcggtcagcaatgcgttgcccttgtcatcgcggaacactgcttccagcgtcacgaagttcttcccacgcttttcgtatttctcgacgacatatccggtcgccgtcagcgtctggttggcgtggacggcgccggagaagacgaaactctgcttggcgcgcatgttcggtccgacctcgtgcatcagaaagttctggaacagatcgtccattccgagcttgccgagcatgtcggaaggcagcaatcgcgcctgccccggcgtggcctcgaaaagcttgtggtcgagttgcatgatgtcgagatattcgtcgagcatcgcatcgctgacggcgagcgtggtccgccctgtctgcgttccgatctcgagctcctcccaagttacgggcattcttaaacctcctagaatgatgatggcggctttatgctgccttggcttcggcgaagcgggctcgtgttccgccggtgtagaccttgctggatacgggatgcccgaccaggcgttccgcgagtgcggtggcgacaagcagccgatcgaggtcgatacctgtctcgatccccatctcgttgcacatgaacacgagatcttccgtgctgacattccccgccgcacccttgtgaccggcgaacgggcagcctccgagcccgccgacggcggtatcgaattcgcgaacgccgagctccatggccgcgatcgtgttcgacatcgctgtcccgcgcgtatcgtggagatgcatcttgagcttgaccgtcggccaacggttgcggatgccctcgatcagcgcccgcgtccgcttcggcgtgccccagcccatggtatcggccaggatgacccgcttgagaccggcctgcccttcgggcagaagctccgcgacgcgggcgagcagttcgataaccttctgcggcgcgatatcgccttcgaaattgcagccgaaggcggccatgacgccgatgccgtcgggcgcgacgcctgccgcgacatagcgctcgatccactcaggcatttccgcgattacctggtcgatattgcggttctggttgcgctgcacgaaggcttcgctcgccgtgacgatcagattgccttcgagatgcagcttgccggcggcgaccgcctggtcgagaccgcgtgcgttcagccacagggcgcgataacgaacgtcgtcgaggacggggagctctgccacgagttccgccgtgttcgccatctgcggcacggccttgggattgacgtaagaaccgacttcgaggtccttgacgcccgcttgcagcagggcgtcaatcagttcctttttctcttcgagcgtcaggatcttcggctcgttctggattccgtccctcagcccgacttcggtgaggtggatgctggatggataattcatggaaacattccttgcaaatcgtcaggcgagaacagccggattgaacggatacggcactgcggcgccacctttcagaggcacgacgaccacggcggtgcccggcgttccctcggcgcccttgtcgttgcgcaacccgacttcgaggctgacgacgccatatcctttttcgacccgcttttcggtcacacgcccccaggcggtcagcgtctcgttgggaaggttcatgccgcggaactggaatgcgagcttccagagccagccggtctcgccgacccaatcgctcagcagctggatcagcacgttctgcttgtaggcaccgctgatcaggacgtccggcagcttgtcgtgttccgttgcgtacttccagtcgtagtggatcttgtgccagttctccatggcggccgaccagcgcatcatatgacccgtcgtaatcggccccttgttcagaaccggcacttcgctgccaacctcgatatcttcaaacgcgagcgtcatggttcccccctagcgcagaatgttggtcgatacggccgtgtagagaggccggtcgtcctgggtgaagtaatcttcctggatcaggatgaagaccatcggtccattcttgccatcccgctgatagatgtccttgtagctggcccggcagaaaatccggtctccgacccgtgcattcgaatggaattcgtactcgtagccgccattgagcagccggggcagcggtatgttgaccggcggcaggcccggacgaagcgagcgctgcacgccgtcgaaatccgacgcgccggaaacttcgagcggatcgggctcggttggtccgcgacgaatgatgtagagggccgggaatgcaagcggcgccacaaggccgccgtaccggctttccttcgcccactccggatcggtgtacttgggcgagaagtcagaaatcgcctggaaaaagcgacggacctcgctcgcctccaccggatgcggagcttctttgactgggccggaaacaccgatcagagcggtgatctcctccgttatgtaattggtgccgaccaggctttccgctgcctgtgacatgtgcgcctccctttgctgtcgcttcgatatgcactcagaacaatccaaaaaaaaacgtaagtcaacactaattttcaaaaaaaatacgaatatcgtcgattgacgcgcattaattgcttgtgtcagtaatcagtacgccatcattggacgaaattcgtcacagtgcgacaaaaagacaacctgaaggggtttccatgtccaaccgatcattcgaatactcaggaagatcgccccatgtgatattcgcgacaggcagccgctctcgcctcgccgagcaagcgaagaagctggactgcggcacgctgatcgtactggcgacgccagagcaacaggatatcgccgaggagatgcatggccatctgggctcggcatcggcgggaattttcgcgaaggcgacgatgcatacgccggttcatgtgacggaacaggccatgcaggaacttcgagaccgcaaagcaggcggaatccttgcggttggtggagggtcgacgatcggattgggaaaggctctgaaactgcgaagccgccttccttacatcgccctgcccacgacctatgccggttcggaagtcacgccgatccttggagaaacttcgggaggcgaaaagacgacgatacgtgatcacagcctgatgccggatatcgttatctacgaccccgacctcacgacaagcctgcctgtttcgatgagcatcgtcagcggaataaacgcgatcgcccacgcggcggagggcctttacgcagcggaccgcaatcccatcagctccatcgcggctatcgaaggcatacgagcgcttcgcaccgccctgcccgtcataaaatcatctccacaagacaagaagggccgagctgacgcgctctatggcgcctggctttgcggaagcgtcctcggcagcgtcggcatggcgctgcatcacaagatctgccatgttctgggtggaagcttcgacctaccgcatgccgaaacccatgccattatgcttccgcattcgatatcctacaatgcggacgccgccaccgaagccctggcgccactgcgggaactgtttggcgaacggattgccggagggctctacgattttgcggcctccctcggcgctccccttgctcttcgaaacttcggcctgacggaacgcgatctcgataaggcgtcggatctcgcggtaaaaaatccctatctcaacccgcgccccatcgagcgtggcgcgatccgcgaaatgctgcagaacgcttgggaaggcaatcgacctgaatagagctgggcattctgttgcgacgcgctcgccgaatgctcaatacgaaagaggacggcatgatgcagtattttaccgaacagaactcagtcgaggccgtcaatgcgcgcatcgggaaggatatcgacccgcgattccaggaaatcatggagtgtctgaccagacacctgcatgcattcgcgaaggaaattcatctgacgcaggaggaatggtcgcaagggatcgatttcctcacgagagtagggcagacctgcagcggagaaaggcaagagttcattcttctctccgatacgcttggattgtcgatgctcgtggacgccatcaacaaccggcgcccgtccaccgcgaccgaaaataccgttctgggacctttccatgtcgaaaatgctcccatccggtcgatgggcgattccataattctggatggcaagggcgaacgctgtctctacgagggccaggtcctcgatctcgacaaccgtccgatcaaaggcgcccgcattgacgtctggtcggataacgccgacggattctacgacgtccagcagcccgatatccagccgaagtggaacaaccgaggtgtgttcatcaccggcgccgacggacgctacagctttatcgggataaagccggtttcttaccccatacccgacgacggacccgttggtgagatgcttcaagggctccggcgccacccccaccgtccggcacacatgcattatctcgtaacggccgcgggctatcaaaatgtcatcacccatacatttgtcggggacgatccctacctggcttccgacgccgtgttcggtgtcaagtcttcgctgatcgcaccgttcgaaaccatgtcggaaggcaccgccgaatggcgatctcacttcgatttcaggcttgtgcccaaccagcgaggtgatctctgatgaaggaagcgcaggaaatgcggctcacttcgacggttgaggcgatgcgtccggcacttgccggcgccaacgcgaacctgcttgtcgtcgcgctgctcgccccggtcagcaccacgagatttctgaaccatcgcgtcattgccaacaagcccgaagcagagggagttcttccatgagcgcagcgtcacgccccagtcgccttaccgcaaatcgaatccgggccatgaaaggcggcaccccgatcgtctgcctgaccgcctacacgacacccattgccaaaattctggacgagcattgcgatcttttgctggtcggagattcggtaggcatggtcctctatggcatggaaagcaccatcccggtgacactcgacatgatgatcgcccatggcaaggcggtgatgcgcggctccaagagagcatgcgtcgtcgtcgacatgccttatgggagctatcaggaatcgaaggagcaggcctaccgaaacgcggtgcgcattctccaggaaaccggctgcgacgccgtcaaactggagggcggcgaggaaatggccgagacgatctccttcctgtcggcacgcggcgttcccgtgttggcgcatattggcctgatgccgcaacaggtgcatacaaccggctatcgatccgttggccataccgaagcggagaccgcgaaaatacgccgtgacgcgaccgcgatcgggggatcgggggcattcgcgatcgtcctggaaggcacggtggaatcggtggcgcgcgaagtcacggacgttctccaaatcccgacaatcggcattggcgcttcggcggcatgcgacggccagattctggtttccgacgatatgctcgggctcttcagcgaatttacgcctcgtttcgtaaaacgatatgatgagctcggcaggagggtggagcgagcggtagccgcatacgcgagcgatgtacgcgttcggcttttcccgggtgaggaacatacgttcaagcgccgggagcacgctcggaagacgtacggcagtgcaaccgatgcgccgtccttggcgaccatcgaaagctagctctgctcaactcctggtgcggaggactgccgaaaccacgctgaagcgccagatcatcgatttacctgccgcttgtccggtgatgcattcgaaatgccttcgccggcttcgtccccggccggaaatgccgcgacgcttgcggctcgggccgctgccaatcgccgatggcagtgcggacgaacgcttggacaagcataggcccgcccgacgttcaaacgcgcctgcacggtacaaacagggatctggcttatatcctgccggatcgcaattttcgacgctccgaggtagcgggcgcaggatggcgaacttcctgcttcagacacgctccatggcaatggcgatgccctgaccgacgccgatgcacatggtggccaaggccagcttgccatggcggagtgagagctcgagcgcggcggtgccggcaatccgcgcaccggacatgccgagcggatggccaagcgcgatggctccaccattcggattgacgtgcccggcgtcctcggcgataccgagttcccgtagcacggcgatgccttggctcgcaaaagcctcattcagttcgatgacgtcgaaatccttgggcgaaatcccaaggcgggcgcaaagcttctgggttgccggtgccggaccgatccccatgatgcgaggcggaacgccggccgccgccccaccgagaatgcgggcgatcggcgtcaacccgtatttttttgccgccgcctccgacgcgatgatgagcgccgctgcgccgtcgttgacgcccgatgcgttgccggcggtgacggtgccgccttcgatcctgttcagcggcttcaaacttgccaaggcttcgaggtcagtggcccgtggatgctcgtcacgatcgacgatgacgggatcgcccttgcgccgcggcacgctgacaggcgtgatttcgcgggcgagacgaccgctttcctgcgctgcagccgccctcgcctgcgaacgcacagcaaaggcatcctgatccgcgcgggatacatgatagtcgatcgccacgttatcccccgtctcgggcatggaatcgacaccatactgcttcttcatcagtggattgacgaagcgccagccgatcgtcgtgtcgtggacttccgtattgcgcgagaaggcggtctcggccttcggcatgacgaacggcgcgcggctcatgctttccgcgccaccggcaatcaccagctccgcctcgcccgccttgatggcgcgggcggcggtgatgacggcatccatgccggagccgcatagccggttgatggtcgttcccgcgaccgagagtggtaggccggcaagaagcagcgacatgcgggcgatgttgcggttatcctcgcccgcctggttggcacagccgtagatcacatcgctcaaagcctcccaatcgacggtggcgttgcgctccatgagggccttcagagggatagcgccgaggtcgtcggcgcggaccgacgacagcgcgcctccgaagcggccgatcggggtgcggatgtaatcgcagatgaatgcttcggtcatcgcttgctcctcacaattccggcacgacgagatcggcaatgggtccatcgacatgcaacctggcccccgtcattgcctgcaactcctcgacgctcatggcggcgcgcttttcgcgcagcacgaaatggccgtcgcgaatgtcgataacagcatgactggtgtagatgcgggtgatgcagccgacgccggtcagcgggaaggtgcatttttcgaccagcttggggtcgccgttcttggtgaggtgctcggtgatgacgaagacctgtttggcgccatggaccagatccatcgcgccgccgacggccgggacgcccttcgaaccgacccgccagttcgcgaggtcaccgttctcggcgacctgcagcgcaccaaggatcgccacgtccaggtgccccccgcgtaccatggcaaagctgtcggcgtgatggaagaaggacgcgcccggcttcagcgtcaccgcctttttccccgcattgataaggtcccagtcctcttcgccgggcttgggcgcctcaccaaaattgagaaggccgttttccgtgtgaaagatggcctgacggccgggcggctggtagcgggcaaccatttccggaaaaccgataccaagattgacataggcgccgtcggcaatgtcctgcgcggcgcgccaggcgatctgagcgttggaaagcttgatatcgtcccgcgcgtttgcggtatgcggctcggtggtcatgcgtagatccctccctcgtagatcatcccggcgcggatcatcgcctcttcctgttgcgggctggaaacttcgacgaggcgatcaacgaaaatgcccggcgtcaccacgtgctcgggatcgatgcagccgacctccaccgcccgggaaacctgcacgatcgtcttggcggcagccatgcacatcaacggattgaagttgcgcgcggccttgttgtaggtcaggttgccgaaggtatcgccgacatgcgccttgatgatcgcgaaatcggctttcagccagcgctcttgaacatattgcttcccgtcgaattctccgatcggcttaccctcggcaagctcggtccccaaggcggtgggcgtgtagaaggccggaatccccgcgccaccggccctgatccgctcggccaacgtgccctgcggcaccagctccagctcgatctggccagccagatagcgatcggtgaaagcgcgcggatcggaagacttcgggaatgagcagatcatcttgcggaccatgccggcatcgatcatcgcggcgatgccgatcttgccgtttccggcgttgttgttgatcaccgtcaagttccttgggctgccggtggcaacgaagcgatcgatcagcgaatggataagctcgatcggggcaccggagccaccaaatccaccgatcatcacaacagcgtcgtcgccgatctcggcgaccgcttcggcaaggccgtcaactctcttgtccacttccgatctcccacaatcccatctccaaagtcggagcgtctgtctggactactcccggtcggagtcgacctcaacatgtttgtgcgatattctttatttgttacgtaatcgcacaacagggaacattatgatgaaaccaggcgacgtgatgggcggcctagcgaagggcctgcgggtcattgaagccttcacggccgaaacaccgcgtttgagtatcgcggaagccgcccagatcgcgggactggatagagcgacaacgcggcgttgtctgttgacgttgtccgaacagggctattgttcctatgacgggaaattcttcaccgtcacaccgcgggtcctgaggctggggaccggatgtctggcgtcgatgccacttccgcgcatcgtccagccttggctggacgcgctttccgaggagatcggacaaagcacctccgtcgcaattctggacgatacggagatcgtctacgtggcacgcgccatgcagcgaaaggtcatgtcgatcgcgctcatgcccggatcgagacttccggcatactgcacatcccttggacgcgtcatgctcgccgcgctcgatgtggatgaagcgcgagaacaacttcgccgccggccgctcgttgcaaggacaccgcgcacggttacggacgagaacgctttgatggccgaactcgatcgcgtcaggtcacagggatatgcggcggtagacgaagaagttgaagacgggctccgatccgtggcggttccactgagaaacgcccgcggcatcgtcgtcgccgctctcaatacaggtttcgctgtcacgacggagccaatgcgggatgcagtcgccggttaccttgaaccgttgcagcgcgtaggccgcgagcttcgaggaatcgtcgcctgacccggatatcgaggctgactggacagcctcgaccatttgacgagaggaaaaagcgcgcaccgtgtactgacctggaactctctccatccgatcctggctgtagcgcgatagatcacgccagccccatcctctggaccggctagcgacgagctggatcgatacctggctgcaagcatcaccacgcagtccgtgcagtccccagtgcgtatgggtgcgaagaacttacatgcgcgacgagttccttaacagaaaccgcgcaattgcctgggcaagtaagattgtacgttgccagatgcttcaacaattcttcggcgtttttcttttcgcttagtgggaaactaacaaccacgaacaatcctcctgcttgatgtagttggattaacctcatagttctttcgcattgcaacgagaaatttttaattcagaaattaaaatcgattagtttgaaatacgcggttttttaaatcgatctaaaattctttggcctcaagtccgtccacgatctcgcccgcgacatcgcggcaaccgtactggaattcagccgagactctatcgagcacaggtgttcgcgcgcaggcaggaggcggacgcccataagccgcaagagaccattccaccgaatagcagtctacattcccacgtaaatagccgatttgtcatgaggtcagagtgcggcgccacagagtgcagcaccaagttcaaaggatgaccgatgtacaaattcagcaccgttagctggctggccgcaacagcaatagcaatagcaatccttccgacgggcgtaagtcaggcggaagaggccaatgcattctacagcgatagttcgaaagctgtccctgtgacgaagctggaattctatcagaacaaggaaggcctgacgattgccaacggctggggcgatccggcatccggtccgcacagcaacttcatcaaaattgtcgggggcgaaggcagcacgctgcactcgcattcctcgtcttattacggcgtggtcatttccggcgtcgttgcgaacgaggccgccgattccaaggcggatcaggcactcgcggccggttcctactggtatcagaaaggtggcgagccgcattacacgaaatgcctctcgcagacagaatgcctgttcttcgtaacatcgcccggcgcgttcgattatatccccacgccgtcgtcgaagtagcgtccgctgaaagctcgatcaaatcttttccgagcgatgatcgccacgcctgcgcacccgctgtggtgtgcgggcgtcgataacgccacctccccacgagccttcagcgttcgagcgggtaaaggccgtactttgcagcttgccggtggacgttctcgccttttccgacggttcgttctttgccgtgaccggggttagccaccccgcgatccagcaactcatcaagatgagtttcagcgccctgtctccgcgagcggacaaggcaatgatcgtcagccagaaactaataaaacatcctgcggaacggcatgatggcggcgcccatcgcggccgcgtcgctggcgatatcggacacgatcagcttcgggccgccgcggtgtacgccgtagcggggacgatcgaaaatctttgtcctttcgatcagcatggacgccagagcggatgggatctggccgccgaacacgatcgcctgtgggtcgagtgtggcgcgtatggcgttgacgagccggatgtaggcaggcgttacctcgtcgacccattccgacacgcccggccagttacggtcgaagtggcggcgcatgtaatggatcgagggtacctcgatgccattccggtttacccgatcgatcagatattgcagggccgggcgtcgttccgtttcgatttcatcatagagcccagagaattcgccggcattgccgttgccgccctgcagcagctccccgtcgataatgacgccgccaccgaagccgtagttgaaactcagataggcaaaatgccggatgaaccggccgatgccgaacatcgactccgcgatagccccggacttcccaccgttgatcacccatgccggcctgtcaaacaggctcgtgatgatcggaccgagttctatcatcgaccattcgtgaagcggcaggggcgcgttatgccgcgtgccatcgacgtggtagccggcgatcgcaaagccgacgccgaaaaaatcgtcctgggcaaggctgttttgccgctgcaactcctcgacctgctgcttcaccagctggagcgcctgatgcattgtcgtctcgcgcagcggaacttcccgctcgccaagaattttcccggcgaggtcgacgatgcagatgccaatgatgtcggtgtttaccgagatgccgcaggcataggcgtaggtgccgttcagggtgagcatcgggcttggttggccacgtcccagccccggctttgccgaccccagcaggacgacattacgttcggcgagatggtcgaggatgcgatggacagattgctgcgtcaggtcggtatgcccggtaacttccgatcgggaaataccgggattgcgccagatgagctgcaacaacttgcgctcattgggggaaacgaccgtcgcctctcccggtcgcagaaaacgcggggcaatcaatacctctggaacgtaaacacctgccaagccgtataccttactgcaaacgtgtaataatcacattgcatctgctgcaaccaaagcctgaatactgttgaatgtcgagggtttcaagcgatttcaagcgtcatggaaatgttacacataaagtgtagtaagccgtcgtcagagatcgagcgaggctcggtcgaccaaaaggacgagggcgatgatgaacaagtttactttggcggccatagcggccgtgatggcgagcgcaggctcggctcaggcggccgacatcgaattctggtacggcaataccggtccggtcgagaccgcgatcaaggctcaatgcgatgccttcaatgcttcgcagagcaaggacagggtcaattgcgtcggccagggctcctacgaggtgtccatgcagaaggcgattgccgcgtatcgcgccaagaacaatccggtgctcatccagttctttgacgccggcaccctcgacctgatgctctcggatgccatcgagccggttcaagacctgatgccagatgtcaagtgggaccagtacatcgccggcgcccgcgcctattacgagacctcgggcggaaaactcgtcgctcagccctacaattcctcgacgctgctgttctacaccaacaagaccctgcttgaaaaagcgggtatcatgcagacgccgacgacgtgggaagaggtcatcgacgcggcccgcaagctgaaagccgccggcaatgcctgcccgctcgtcaccgatggcgatacctggcgtgtgctggagcagttctccgcgcgccacggcctgcccatcgccacgaaaaacaatggctatgacggtctcgacgcggaatacgtcatgaacaccaccttcgctgccaagcacctcgccaacctggtcgagtggcgcaatgaaggcctcgtgcgcctcgccgccgacaccaaggccggcaactataccgcggccttcaatgccggcgaatgcgccatgatggagcagtcctccggctcctacgcggcggccgccaaagctttcgatggcaagtacgagctgacggttacgatggctccgatgtacaagggttatgagcgccgaaacacgttcgtcggcggcgcttccatctatgtcatgaaggggcgtggcaaggatgagatcgaggctgccaaggcgtttctcgactttctccgcaagccggagcagcagatgtccttcacagcgaatacaggttatgtacctgtgacgaacgacgttctggatgcgatcgccaggagcgatgaagcgaattcgccgaaatatgccaccgccaaggtcggcgtcgaatccatgaaccaaccggcaacgcctgatacccgcggcatccgtctcggcttctatgtccagttccgagaagtgttcatggaagagacccaaaaggcctttgctggccagcagaccatgcaggttgcgctcgataacaccaagaagcgtggcgaccagctgctgcgccgtttcgagcagacctacaagggcaagcagcttccctgatccattccgctcagccttcgtcgcatggggcgcaactcgccccatgccttctctttctcggaagtgcctccatgtcgtcggattcctcccttttcagtcatcgctggctgccggctctcctgctggcgccgatgatgctgttgattgtgctgttcttctatgtgccggtcttccaggcattctactggtcattcttccttgaacaaccgttcggcggcggctcggaattcgtcggcctgcagaatttccagcgcgtgctcggcgatcccgaattctgggcggccaccggtcgcacggtcatcttcatgctgacggcatccgcgcttgcggttgtcgtgccgcttatgctggcgatcgctgccgatcgcaagattggcatgtcctatccggcccgcaacattctggtctggccgaagggcattgccggcgcctcgatcggtgtcgtcttcgccttcatcttcaacccgttcgtggggctgatggcgccgctcaatgcgctgtttccgggtctgtggaacccgggcatcgatggcacggacgcgttcgtgacgctggtggcagcccatgtctggagtggcattccgttcaacttcgtcatcctgctggccggcctgcgctcgatcccgcccaccatgtaccaagccgccgccatggatggcgccggcccttggcgccgcatcttcgatgtgcagctgccgctgatcatgccgcagctgttcctgaccttcgttctggaattcacggaaagcatcacctcggtcttcgcgctgatcgacaccattaccggcggcggtccgggcggttcgaccacgctgctcgtctacaagatctatgtcgatggtttccgtggtttcgatctttccggcgcctccacccagacggccatcctgatggtcttcgttcttatcctcgcagcctgccagttctacttcctcggccggcgcatcaattacgagcgctaaatcatggtcgagaacgcacgctccatcaacatcgcggccagtatcctgctggccatcggcatcctctatatcgtcgggccgctatacctgacgttgtccacggcctcgcagtcctatgagtacatgctgcgcaatggcctcgcctgggtgccgggcaccgagcttttcagcaatatgcgcaaggtcatccaggatacgcgcatcccgatccagatgctcaacagcctgatcgtcgccttctccaacgcgctcgccacctgcgtcctgtcattcctgtcagcctacgcgatcgtgtatttccgtatccgctgggcgggcgtggccttcgcgctgatcctagcgacgatcatgctgccgctcgatatccgcgttatcaccacctatcaggtggccgccaacatcttttcgccgctcaatgccgtgctcgattttaccggcctcaacagcctgatcgagatggctttcggcgcaccggtccagctcgaactcagcgtgctcgacacccattttggcctgatcgcgccactggtcgcgcatggcacgggcacgttcctgtttcgccagtttttcctgacactgccgaaggacctcttcaaggctgcgcgcatggatggggcggggccgatccgcttcctcatcgatatcctcctgccgcttgcccgcaccagcttcgcctcgctgttcgtgctcaccttcctcagcggctggacacaatatctgtggccgctggtcggcgcctcgacgcccgacatgcagaccgccgttgtcgggcttgcccgcctcgtgccggatgccgacggccaggttcccgattttccgatgatcatggccggtgccgtgctcgtctcactcgttcccctcacgatgatcgcccttctgcagcgctttctcgtccagggcctcgttctttcggagaaatgatcccatgaccgccatcgacttaagcatccgcgccgccgcggcggagatcgatctgatcggcgtcaccaagtcctatgacgccaaaaacaccatcatcccgccgatcgacgtcaccttgcgtcctggtgaattcaccgtcgtgctcggcccgtcgggctgcggcaagtccacgcttctgcagatgatcgccggtctggagcgcgtctccggcggcaagatcgttatcggcggtcgtgaagtgcaggatctggaaccgaaacatcgtggctgcgccatggtgttccaaaactacgcgctctatccgcatatgaccgtggctgaaaacatggcctacagtctgaaggtcgctggtgtctccaaggccgagcgcaccaggcgtgttggcgacgttgccaagatgctcggcctggccgatttcctcgcccgcaagccgggccaactgtcgggtggccagcgccagcgtgtcgcgatcggccgcgccatcattcgtgagccgggggtacttctgttcgacgagccgttgtccaacctcgatgctcagctgcgtcacgacatgcgggtagagcttgccgaactgcatcgccgcattggtgccaccagcgtcttcgtgactcatgatcaggtcgaggcgatgacgcttgccgaccgtattctcatcctcaacaagggccacatcgagcagttcgatacgccgaaggcgatctatcaccatccggcttccgtcttcgtcgccaaattcatcggctcgccaccgatgaacatcctgcaggtcgaaggtgacggctcggttctgcggctggccgatggtcagtcggttgccaactattccggcaagggcaaatttcaactcggcatccgtccggaagatattgtcgtcaacgcaggtgggtcgatcaagacggaaatccgttatcgcgaagacctcggctcgcacgaaattctggaaacgaagatcgccgagcagaacctaaggatcgccatgcccttcggcgtcgagatcgatacgacgcagaccttgtcgctctccttcccgcaggcgcgcctgcatctcttcgagggtgaaagcggccgcgccatcgccaacgcattcggcgacgcgcaaccggcttcggcgaaggaataccagtgaattacagggaatttattgccgacaagacccgcgattgtgccgtggttgcgcatcgcggcatctggcgcgatgcgccggaaaacagcctgtccgccatcgagcgcgccattgccgaaggatatgatgtcgttgagatcgacgtccgccgcagtgccgatgacgggttgtttctgctgcatgatgaaacgctggaacgcatggccgggcttgatctgaggtcggaagctctcgcatcgggcgacttggcggtgctgcgcctgcgcaaccgggatggcggggaggacaatgccttcacgttggaaaggctgccgagcctcgccgaagtgttcgagctgacacgcgaccgcatttttttgcatcttgacgtcaaggatcgtgaggtcatcccggatgtgatcgccctcgcaaaggctatgggcgtcgagtgtcgagtcgatttctgggcatcgctgaaaagcgaaaaagacctcagctggatacgcgagacagtcttgccgcatgacgtgctctttatggccaagacccggctcaacgtgcctggtgccgcagcgcagctggcgctgctcggcgaactgatgcctggcgtctgcgagatctatttcgatgaccttcaacagctctccgcgctcaacgacatccggcgccgaaacggcatggcgctctgggtgaacacgctcgacagcatcgcctgcgctgatttcaccgataccgcggccctagccgatcccgatgccgtctggggacggctgatcgatgccggcatttcggtcatccagaccgatgaggccgccgccctcaaatcctatctcgcggcccgccgcgcctgactgaccaaggaagaatgaaatgacgcattacgtagattatatcgccgaccagaaacgtgatcccgccattgttgcccatcgcggcgcctggcatggcgcgccggaaaacagcctcgcggccatcgaacgtgcgatcgcggttggcgccaacgtcgtcgaactcgatatccgcaagagcgctgacggcgaacttttcatcatgcacgacgacacgctgctgcgcatggccggtatcgatcgtgatgccgaaaccttcaccattgcggaactgcaggccatcgcgcttcgtgaagacgatggcggcgaacatcgcgccacgacggatcagcgcattccgacactgaaacaggcgctggaaatcatccgcggtcgtatcttcgccgatctcgatctcaaggatcgcggcctgttttccgaagttgccgcctgcgcccgcgaaatgaatgccgcatcctatgtggacctgaagacccgcgtcatgagccgcgcggaactggactgggttcgcgcacaagatatcgacggcgttgccttcatggcgatgtcgaaattcacaagcgcgagcatccacgacaccatggcgctgctgtctgaaatcaagccgttcatgtgcgaaatgcgcttcgaccggctggagacggtcatcgaacatcgcgaggcattccgcgatgctggaatggcgctgtggatgaacacgctcaatatggaagccagtggcgaatgggtggacaagacggcgcttgtcgatcccgaccgtatctggggccggttgatcgacgccggcatcagcgtcttccagaccgacgagccggaaacgctgaaggactatctggaggcacgccgggcatgaaaaccgtcaacgacgacctgcttgatgaactcatgagctatgtgcgcgaggcggcggtggaagagatcctgccacgcttccggtcgatatcgtcggacagcattcgcgccaagacggtggccgacgatatcgtcaccgacgccgatatcgcatccgagcgggctatgagcaaaaggctggaagcacgcctgcccggtatcaccattgtcggggaagaggcggtgtcggacgacccttccattctcgggcatcttgccgatgccgaacttgccgccgtcatcgatccggtcgacggcacatggcatttcgcgcacggcacgccgatgttcggcagcatccttgcgatcgtatccggcggcagaaccatcgccggcatcatacattatccggtgctgggcgacttcctcgttgcacgaccgggcaagggtgcgtggcatgtggcggcagacggcgttcgcacgcgtctcctggccgcagccgccgccccggtgaacgaaatgcatggtttcattccgctccacatgttcgctcccgacctcaggagcaaacttgcgccgagattgctgaagttccttcgggtcacgacgtggcgctgctccgcgtgggaataccgaatgctggcaacaggggcgatgagcttctgcctcaacgagagcctgaagccctgggatcacgccgccggtgtcctgatccacgcggaagcaggcggctatgcggcaaccgtcgcaggtgaggcatatcggccatcgatgactgaagggcatctgctcacggcacccgacgagacatcctggcatgcagttcgcgaggctatctcgatggacgatttgtagccacggttcctgcttggcaagatcgtgcagcttcccgcctggattgtcacatcaagcgccatcgtcggcttcatcggcgatcagaagacgtggcgagcaggcgggcgccatggcgatgaccacacgctggcgcatgccgccggaacgttcgtgcaagcattggccaaggcgtggataccaaactctgcgaatttggaacctaatctcggaattcacgagttactatcgggctccggcgtttgctttggcggcgccttgccatttcgctccacgcggtcacggtggagtgcggcgcgggcaagcatcatcaaggttatcggcgtggtcaatgttacgaagacgccgatcagaatttcatgtatcgccagccgtgaagccgcggcactgaaataaaccatcgatcccagcatcacaccccctataccccaactcgtgccgagtgtcggggcatggatgcgttcgtaaaacgtgggaagccgaaggaagccaatcgagccgatcaacgcaagcagcgcgccggcgataaggagaaaggcaacgcagacggccacccatacgggaatatccagcgcggaatacatcattcgatcacctcgccacgcatcaggaatttcgccagcgcgacggaggcaacgaacccaagcatgccgatcaccagcgcggcctcgaaataaatgacgcggccggttccgacgccgaaggtgacgagaagcagcatggcgttgacgtagaatgtatcaagaccgatgatccggtcctgcgcgcgtggcccgatgaatatccgcacggaaacgattgccatcgcggcaacgagcatgatctgggcaatcgaaacggcggtaaagagaatgatggcgctcacgcgaagatctccagcagcagtttctcgtagcggttcttgatcgtgtcacgccatgtggtctcgttgtcgatgtcgagcacatgaagcaggacggaatgatcattggaatcatattcgagccaggcagatcccggggtactcgtgaggatcacggcgagcaaggcaagcgcgaactggtttctgatatccagatgaacagtcacaaatccgggcttatggcgtcgcgaaccgctgcgcaaaataatccatgccaccgcgatgttcgacttcacgatgtcgcagagcacgaaccaacacaactttggcagaaggtaccattttttcaggcgtgccttttccggccgcaatgatgccatcgcccaacaggcgaacacggcaacgagcgaccccaagatgaggtgcccgatggaaaagcggttaagcagcaaccacattataaccagactgagcgcaaggaacggatatggcaacatcagttgctctccacttcgctcgaggatgatttgacatcagcgccagtcggtgctgccgtgcgaacggcatcgatatagagggatggcttgctgagcgttcgaatggtggtgtccatatactgcatggcgggtcccgcctgaacggtcagggccagcgtcagcccgagcaggaacatgaccggcaatatctcgatcacaagcacgcgcgggacagtcccttcaatggaactccaaaacgtgcgtatacctgctcgcgtcatcgaaatcagcgcggcaatgccggacaggatgacgagcacgatcaacgaccagatggcggccgtaggcggaacaccaatcgctcccgttcccatcatcgccgacagcatcgcgaatttggcgatgaatcccgaaagcggcggcaggccggagagaagaatgccgcaggcggcaaagcagatgcccagcacggccatggtgccgggcatggttacgccctgctcttccggaacctcttcgtcggcggcgtcgccatatgcttccatggtaacggcaagaacattggcgcccgcatcctgcccccgttccaccagttcgatgagcaggaagaacgcgctgatcgtcagggtcgagctgaccagatatagcaatgcgccggatgaaacggcaccgtcgttgatgccgataaccatcagcagggtgccggatgaaacgagcacggaatatcccgcgacccttcccagcgcctgggatgccagcacgccgatgatcccgaatacgagcgttgccatgccaccgtaaaacagcacctgcgctccgaaacccgcagatggcccctcaacgaacagaagcatcgtcagcctgagtatcacatagatgccgagcttgctcatgatcgcgaaaatgcccgcgaccggcgccgaggctgcgctataggcggtgggtagccagaagcacaacggccacatgccggcttttatgagaaagacgacgccgagaattccggcgcccgcttccatcaacattcggcgatccggctccatctcgggtattctcgccgccaaatccgccatgttgagcgttcccgccgtaccgtagatcaaactgacgccgatcaggaacagcagtgccgccaccaggttgacggcaatatagtgcagcccggccttgacccgcagctgccccgatccatgcagcagcaatccataggaggcggccagcatgacttcgaagaaaacaaagagattgaagagatcgccggtcaggaacgcaccgttgacgcccatcagcagcaattggaacatgctgtgaaaatgcgcgccgaccgcgtgccagcgcgcgaacgaaaacaccagcgaggccaccgccagcaacgccgtcagcagcagcatcatcgccgagaggccatcgaggaccaaaacgataccgaagggcgctgcccagtttccgacgagatagacgccctcaaaaccactcgggccgctttcgatggcgaacaggataaccgcaatcgccgtcagcactatggtcgaggccaggctgaccattgccttggcgacccgccgccgctcgtcgataacaagcaatatcgcacaggcaacaagaggcacgagaatcggtgcgacaatcagatgattggaccaaccgttcatttcggttcatttctcccgtcaacatggtcgcttcccgtcaggccccgtgacgcgagcagcaccacgagaaacagtgccgtggtggcgaagccgataacgatggcggtcagcaccagcgcctgcgggaccgggtctgccagaacggacggatcgtcggcgccaaggataggcgggacatttgccttgacccctccgacgccgaagatgaacaggttgacggcataggacaggagcgacagtccgacgatcacctgataggtccggggacgcaggatcagccagacgccacagctggtcatcacaccgattgcaatcgacaatgtcagttccatcagccctcctccgactttgccgcctcgatggcgcgaaggcgattgatgcgaagagactggtgcgccagggcgacgagaatgagcacggtcgatccaacaaccaggaggaagacgccgagatcaaacagcaatgccgttgcggcgggcacctttccgatcatgggcaggtcgatgtagcgtgtatgtgatgtcaggaagggatagcccagaaaccacgcgccaataccagtcatgaccgccgtcatcaggcccgccgccatccagcgcaacggaaggatccggatacgatcctcggcccagcgcgtgccgccggcgagatattgcagcagaaatgcaatcgacagtgtcaggcccgccgaaaagccgccgcccggcaggtcgtgaccgcgcatgaaaagatagatggagagtgtgatgaccaccggaaacatccattgcatgatcaccgatgggaccagcagataatcgcgaaccgtatcgccggcggaccgttccggccgctcgtcgtcgaagcggttttgggcctgctgctgttccggcatgctcatgctgtccgccgccggtcggaagcggcgaagcaaggcgaagacagtcagtgatacaacgccgagcaccgcgatttctcccagcgtgtcgaagccacggaaatcgaccagaataacgtttaccacattgcggccgccgcctagcgtataggcattttcgaggaaatagttggcgatcgcatcgggcaccggcatcgtcatgaccgcgtaggcgatcgacgaaatcgcgactccgcagacgacggcaagcgcgaaatctcgaaaccgacgggatcttgcccgcaatgtcatcggctcgccgatctcctctgaacgtttcggcaaccagcgcaggccgaggagaatgaggacggtggtgacgatttcgacgagcagctgggttatggccagatcgggagcagacagccaggcgaacgttatgcagacgatcaatccgacgccaccaagcatcatcagggccgcgagacgatgatacttggccatgtaggccgtaccgattgcaaggcacacaccgatcacccacagcgctgcgaagattggatcagcgccggtataggaaaactggcgggcttcgaagccacgcagataaagcggaagggcgccggcgccaagacctgcgacgaccagccagcgaagctgcggctgcagcttgcgggtacccaaacgccgctcggcgacacgcgcccagcgccaggagacctccaccaggattcgttcgaaaatacgctggcccttgaggcgccggatcaggggcggcccatcgtcgcatcgtgaaagataacctttcagcaccacgtagatggcggttcccgcgatcagcgcgatgacgctcatgagcagcggaacgctgaacccatgccatagcgcaagactgtactgcggcgtgtcctttccgagaacgctgaccaccgcgctatgaagaaacggcccgatcgacaatgccggaacaatgccgacaaccaggcagagcacgaccaggagctcgatcggaaagcgcatccagcgcggcggctcgtgcggacgcgcgatcggcagatcggtcggtggcggcccaaagaagacggtgtgaatgaaccgcaatgagtaggcaacgctgaaagcaccggccagcgtcgcgacatatggcaggatacgatccagtatggaatcggcattggtctcgaccgcctcggcgaagaacatctccttcgaaatgaacccgttcagcagcggcacgcccgccatggcagcgctggcgacaatcgcaagcgttgccgtgatcggcatgaaccggaacaacccgctcaacctgcgcatgtcccgcgttccggtctcgtggtcgatgatgcccgctgccatgaacaacgacgctttgaaagtcgcgtgattgagcatgtggaaaatcgccgccaccgtcgctagcgggcttcccaggctcagcagtgtcgtgatcaatccgagatggctgattgtcgaataggcgagcagtcccttcagatcgcgctggaatatcgcgaaataggcgccaagcagcagggtgctcattccggcaacgccgagaatccagaaccactcgtaggttccggacaagactggccagaaacgcacgagcaggaagacgcctgccttcaccatcgttgccgaatgcaggaaggctgacaccggcgtcggcgccgacatggcgttcggcagccagaaatggaatggaaactgagcgctcttggtcagcgctccgaggagaatgaatatcagcgccggcagatagagttggtgattgcggatcaagtcgcccgaagccaggatcttgtccaggtcgtagctgccgacgatgttgccaagcaggatcaggccgatcaaaaggcagaagccgccgatcccggtgattgtcagcgccattctcgcgccatcgcgggcggaggaattattgtgccaatagctgatcagcaggaacgagaaaacactcgtcagctcccagaataccgacagcaggatcacattgccggaaatgacaatgccgagcattgctcccatgaacgcaagcaggaacgagaagaaccgaggaacagggtcctcctccgacatgtaatagcgagcgtaaaggatcaccaggaagccgatggcggtgatcagcatggaaaaaatccatgcaaagccgtccattcgcagcgtcagatcaaggccaagctgcggcagccattgggcgttgaaacgcacgacgccgccgtcggagacttgcggatacagggaggcagtgagcagcagcgagaaaagcacgacaaggcccgcgaggccagcgggcaggcgacgtgatgcggttctcaggaagaagaccgatagaatgcttcccgcgaacgggagaagcagcagggtaacgagcatgaatggtccggcagttatcccaatgcttctgccctttcgaactatcaaccaccaggtctgccgcctttcggcgaccacctagtaattgttctaaaattacgctatatgatctatatcaaccaatatgggcgactaggcaacatgggtcaagctcccgactgcaagattttgacgccagccctctgtcgagcggcccgcgggatcgttgattggacgcagatggaattatccgagcgcgccggcgtttcgcgtagcacggttcgagattacgaaggtgggcgccacgatgttcatcgcgcgaccgcggcgcaattgaaactcgcgctggaaagtggcggcgtcaatttcgtcgatctggagaatggtaaggtcgctgtttgctctaataaagagtagcaaggctcctcaggcctgcctcttggcgatgttcgcagctccccagagcgagccgacattgatccgattgggatagagctgcagcatggcgtcatagagttcgcgcgcagtcgtcgtcgcttcgttcaagcgattgaagtcgcggatatattgccgcgtttcgccgatgatgcgcggatcgtcgggattttccggcaccttgtgtcctgcgatcaccgtgcggggtgccagcgcttcgagcttgtccagcgtggatatccattctcgccggctctccgtcgtggtttcgccgagataagggtgaatgccgttgtagacgacgtcgccgccgacgatcagccccaccgatgggacatgcaggcttgttgataccgccgtatcggttcggccggcattcaccgccacaagcttatgcccctccagctccagctcattgctttccagaggttcggccgcaatcagccgctcggggatctggcctggaaagagcctgcgccagaagttctcgaccgagacgggcgacagatgctcatgcatggcctcgaccacggccggcgtcgcgacggccctggcatcaggaaagcgctcaaggagcggcgcaagtccgaaaaagtgatcgccatgcccgtgggtgatatagatggcggtcaggttcctgccggcagctgtaacccaatccgacagtgtctgcgtctgttcgatggtgaggaacgtgtcgatcaggacggcatcgcgttcgccgtagatcagcgtggatgaattcgccacccacatcagctcttcgtgcccgggtggcacatcgcggctgagccccgggcgcttgatattcagggtcttccaggaaagtccatcatctgaggctgagcgtgcggtcatctttctctccttagtttgagaagggtggcccggtcttgaaaccacggcttttctcctcacggcaaatggcgtttcttgacaccggcttgctggtggtattaattacaaggtgaccggtcggaactaaatagtcaaggatgcctcgaatgaaatcttcttcacctggccgaaggggtccaaaaccgaagcctggaactcgcgacaatctcgttcaggcgggtttgcggatgtttcacacagacggctatgccgcgacgggtgtccagggtatcgccgagagcgtcggcgtccccaagggatcgttctacaatcacttcgccagcaaggaggttttcggcgccgaagtcctcgatgcctattttgatcgaaacgaagacaggctgcgcggcatgctttgcgatgcggaaattgcccccgttgcccgtttggcgggctattttgacgacaggatcgaggcgttcagagcggccggcttcgtcagggggtgcctgcttggaaacatcagcgccgagatcgccgatcacagcgtgctcatgcgcgagcgtctatcaatgcactttggatcttggacccgtttcttcgaggcttgcattgtacaggcacaggatgagggaacgatcagtgacgcgctgccggcgccgcttctggcccgctttgtgctgaacagttgggagggtgcattgctgcggatgcgggctgaaacgagtgatgagcctctgctcgacttcaagaggaccatattcgatctcgtcctgaaatagctcgccgacctctgatccgaaagacaatccagccccgctcctccggcgaccggtgggtggagaccggggcgcctgcccggtctgcccaaaggcatgacggcatcctacttcgcaatccaccgggaaccccggcctggcatccgccagaccggagcaagaaccgccgtcgatcaatgatcgtcgtcattgttgtcgtggctgccgttggagccgttgtgtgcagccgatcgtgccaggggctcgcccgtcgcgcgatcgacatgcatgtcgctgcgcacgttattcttatccgtcacgtcgacatcgtagtgtccgtcatcgcggctgatctcgcgtaccgaatagccctgggcttcgaattttgcggtgagttggctggccgccatccaggctggctcgttcgttggcgtctgggcggtggccacgccggcggtgacggcgaccacgccgatagcgacaatcaacttacggtaatgtgcgatcatggaaagctccttttggacttcggcaaccgaaccactcggctgcttcgatgcccttatgcaacagggccgctgatcgcatcctgatgccgcttgtcagcttgttgtcagggccatttcgatagagaggtgggatggtccgtttgattgcgatatcgctgctggtgtgtgcgacgtcttatgcacaggcggccgaggattccgacttggcccgcgaggcgatgaagcgcggagaaatcctgccgctctcccgtattctgtcgattgccgagcaggtgaccggcgggcgaatgatggatctcgaactggatcgccacggcggccgctatgtctacgatctcaagatgatcgacaccaagggacaaatgatcgaattgaagctggatgcgtccaacggacgcattctagagctggagaccgatgactgatgcgcatccttgccgttgaagacgaccggcgcattgccaccgacatcaaggccgcgctcacgtcagccgggttcctcgtggagcattccgcgaacggcgaagaggcctggtttctcggcgataccgaagattatgccctcgtcgtgctcgatcttggcctgcccgacatggacggattatcggtgctcaagaggtggcgcgcggcggaccggcacatgccggtgctggtgctgtcggctcgcggaacatggcaagaacgcgttgagggtatcgatgcgggtgccgacgactacttgccgaaaccgtttcgcatggaagaactcgtcgcgcgcgtccgctcgctggtgcgtcgcgcctcgggccgcggtgcatcacagcaggatattggtccgctcagcatcgatctcaacaggatgaccgtatccgtcaacggcgtgccagcgaatctcaccgggcttgaatatcgggtgctggcctatctttccctgaaccaggaacggtcggtcacgccccacgagttgcaggatcatctttatggcgacggcaacgcgcgcgaggccaatgcgcttgaagcggtgattgcgcgcctgcgccgaaaacttggcgccaacgcaatcatcacccgccgcggtttcggctattcgatcggcggtgatcgcctgtgagcaggctttcgctgcatcgccggctggcgctttacggggccgcggcaatcctgctcgccctcgccgccgccgcgatggggctcacatggctgttcggcattcatgtcgagcggcgcgccgttgccgagatggaagttcagcttgagcaggttctctctggcctgacaatcgccggcggcaagctgaccgctgacaaactgccgatggatcctcgctactcccggccttatggcggtcgttactggcaggttcaaaagggcggagaaaccttgcgctcgcggtcgttatgggatgaaacactgtcaatcgacggcgagagcgccccgtccggagaagtccggatctaccgccagagggggccgggaggcactccagtcctcggcatagagcgcacagtcagattgcccgcgacactgcggggcggcgaggcaaaactgacggtggcgatggacgcgtcggaactgaccgaggcgaaaaaggcctttgcgttggatctcgtgccctctcttgtgctgctggcggctctcctgattggcgctcagcttgcgcagcaagtctacgggctgcgcccgctcaagcagatcggccgccgtgtcagcgacctccggaccggccgggcaagccgcatgggcgcggattggccggacgagatgcgcccgctgacgaacgaaatcgatgcgctgatcgaagagcgctccgccgatatagagcgcgcgcgatttcgcgcaggcgatctggcgcatggcttgaaaacacctctgcaagccctcctgggcgaggcaaatcgtctgagtgaaaaaggcgatgaggccgccgcctcggccattgaaagcgtcgcggacagcatgcttgcgcatgtcaatcgcgaactcgcacgaacgcggatggcggcgcgccagagcgggacgcaggcgcgcgcaaatctcgcggaagtcgcagggcgcgttgtcgccgtagtgaagcgcacgcctgatggcgcccggctcgaatggaccgtcgaagctgccgacaatcttgtcgcggtgatcgatccagcggatcttgcggaagctatcggcgcattggcggaaaatgcggcgcgttatgccgagaaggccgtcaggatttcggcgaggcgcgccaaatcgaaactgacaattcacgtttgtgacgatggccccggcatacctgatgaagatctgatgcgcgtgctggaacgcgggcgccgtcttgatgagggcagtgtcggcgaagggctgggccttgctattgcaaccgacatcgccgaggccgccaggggccgactgaccctcgaaccaggcaaggaaggcctctgcgctgtacttgaactaacggctgccggcacatagcacagcgctacgccgccctttatcgaggcgtcaggcgccgggcccgccgggaggcatttttgcgctgatgcaacgcgccatatgcctcggatcgaagttgacaggcttcgccgcagcttgaagagcctgacagagagacacctgcctaagatcagaggtgctggttagaaatcgcggcgtcacgcgcaccacggcggtgtccggatactgccggtcgcgtacggcgccgggccaataatggtgttccggccgttctgcacctgaaagatcaggtgagcctggctgatcgactgatcgcttgtgtcgtcgggaaaggcgagcccaacctgcccttggcttccaagaaagtaggagccgttcagtccgcggctgatcgacgttcgcagctcgtatgacacttccttgaacaggcgaggatgcgcggctctgagccaggcaccgacgagcagatggacacggtcgtaagcaaggctggcctgtgagctacccgggtcggcgttgaaggatcggcgatatctctctcgaaagctctccgcgatcggatctgaatagaggccactcgtggtggcccacacgacgccttcggcatggtcgccaagttcgctctggaactgcggtacagatggcccgtagatatcgtagacgatcgcgcgaagcggattgtcgagaaaggctcgctgaaacgcaaccgaatcctcgacgaagtaggaggcaagcatgatgagcgaggaatccagctggtgaagcttgcggaccgcctcttgccagcagttgcttctttccaaagcgacatcgacgatgtcgatctgccatcctcgccgcccgagttccgtctcgagatgcgcaaggccaatatccagacccgcccagaacggcttgaggatcgccagccgtcttttctgagcgcaccaatgcttggctgcatgaagatggtggacaaatcgcgcaagcccaaggccgtagttcacatcgcttgcacaggtctggaaaatgttgccgagccgggcacggctatcgcgcacccgctcgacggcgtgatgcatggtcgcggcatggagatacgggattcctgcctctccgacggcatcatggacctgctctgaatagcaggcatagcccgcggtgatgccatcgacctccttttcgatcagatcgcgataggccgcggccgtgctggtcggatcgccgctttcaaaggccaccggctcaagacaaagcggtcgcccggaaataccgcccctcgcattgatctcggcaacagcaagcgtggcgccgttcaacatctcgatcgagtcggcttttccacggccgctttcggcaaagggcagaccgatgatcagcggtcgcacgctcgttggacggggccgacttggttcctggcgctcgaggcccggctcgcgaaggcttgccgcggcctcttctatttcggttaggccaaggccaaggttgtgtacgccgcctggcgtgggcagccggcagatgccctgctgtatcgcgtagctggccagtgccgcgcggctccacaattgcatcttgccgaaaagattctcgacatgcttttggatcgtccgcttgctgatatcgagccgaagggcgatgttttcgttgctgaggccgatcgcaacgagggtgagaatatccagttcccgcaccgtcaggttaaacgggggagaaacgagcgtcatctggaccgttgccacccggcgaccaaggagggcggcgtgccgcgagatctctacacggtgccatcggctctgatgatcggccagatgaaagacgatacgctcacgatcgagctcaagcagggcgcgcgcatactgcgtcacctcccggaaggcgacgatgtattgcgcgccggtgcggtcgtcgaactccatgacctgtccgtggtcgtcgacgaagcatcgccaactgtcccgagatggatccatttcagcgcccttcttcgcggcctcgcgaacgataacacgtgcgtggcagggtttaccggccacgcacgagagtcaaggacgtgttagggaaagcttatctgccgggccaattgtaatctttcggcatgggcgcaacaccacgggcgtcgggcagggccatgcggcggcgatcatcgtcgtcgtccatccatgcgcgggcaatctcgtcgcaggtcgcaaaccataccccgtcatgtcccttgatatgctcgatcaatctttcgagcatgatcatgtgatgggcctgcccgatgatctgcgggtgcagcgccatcgcataaatgccgttttcctggttggcataaccgtagtcgaagatgtccttccaccgacgcaggacggcgtcggtatcggacatcccttcctgattgcccgtgtatgccagcgccgggaagtcgtcgagataccaactcaccggaatttcgagtaccttgctcgccggcccggcaacgttgcccgtctcccagttcacctgccaacgctgcgggcgatatggcacaaggtctcgggccatcaggctgctgtcgtaaagaaaccccgcctcctcgatcaggtcgagcgtgttttcgctgtagtcccagtaaggcgaccggtagccggagggtcgaattccgaagtgcttcttgtaggtggcgaacgcaaggtccatcaggcgacgctcggtatcccggtttatgagggtcgggttctcgtggtagtagccgtggtgcgcgatctcatgaccagcctcgaagaccttctgattgatctcgggaaacgtatcgaccgtatgagccggcgtgaagaaagtcgtgcgaatgtcgtgcttcttgaaaagcgcgagcagtcttggcgtgccgacggccgcaccgaattcaccgcgagacatgaacgaaggcgtcggacggttgaaaccgccgagccagagtgattgcgcgtcgaaatcgacaccgaggtttacggcaatcttcttgccggcaggaagtttcaaagaacccattttctcctccttggatagggtcgcgcgaagccccacgcgatcggggccacgcttcatctcactcatgcttttggaaggtcctagaggtgcgaaggccacgctctgtagagatcggcccgacggcggcgatccttgaatgtcgtggccgcgccggtctcccggttatcgtagagaaggtccaggttgaccgtcccggtcacggtagtttcgacgttcgtcggcgcctgcgcgatgatgccggcggggttcgtccacgcgagatcgcatggtccaagaaccgaactctgcgcccagccgttcggaagcggccctcccggctgcccgccaaggcagcaatggacaaggtagatctggttctcgatgcagcgggactgcgcgcagtggcgcacccgccaaaagccttgctcggtgaatgtcgccgacggtgtcaggatgatctcagcgccctgctccaccaaggatgccgaacattcgggaatttcggtctcatagcagatgttgaagccgaccttggcgaacggcagctggatcacctccatcttcgatccctcagaagtcgaccagtgcgcttccgcgggaaagatatgcgtctttgagtgctgaaagagttcgccgttcggcccgaacagaaatgcgatgttctcgaagcggtcttccgaaaccttgaccaggtgcgaaccggccgcaatgaactgcccgcgccttctggcctcctcgctgaagagagactgataatcgcgggtgaactcgtcgatcaagaccaattcggaaatcggccgcgtcttccagttcttgagcgttgtgaagagttcgatcgtgaatagctcgggaaacacgacgatgtctgagccggaagcctggtccagtagcgtgcgaacgcgcatggccatgtcctcgaagccaccgatttcgcgaacatggtactgacaggccgatatggtgacctcacgtggcatttttctcctcctgaaatgcgcgggcccatgcaagttgcaaaggccttggggagaaggctaatgcggggaggatcgagcctccatacgccttaatgcgtacgcgatgagatatccgccagatgcaccggagagatcgtccaaaaccttcctcgaatgcatcgctgtcgatagatcactcgccagccgcatcgggcgccaaggccaaggctttccgggtcgaattgcgaacgatcaattccggtcgcaactcaaccatcttgaacggcgagtccggcgcgatgctgcgtccaaggataagctcgcgtgcgctcgcacccatctcttgccgagaataggatatcgtcgtcaatgacacatagtcgtaagccgcaatggcaatgttgtcgaagccgataagttcgaagtccagacctgcggtcaatcctgcctctctcgcggccccaagcacgcccaaggccataagatcgtttgcggcgaatatgcctgtcggatattgcccgagtgcaaaaagttcgcgagcacagcggtagccactttcctgcgtgtagtcgccgcggaagagcagaacctcatcgcatccggagttggctgccgcccgcaaaaatgcctcgcggcgaagcgatgcgccggcgccatcgccaccgtcgatatgcgccatctttgcatgcgaatggcccattagatgctcggcggcgatccggccgcccgcttcgtcgtccaccgatacgcaatcgacgccgccgatacgtctgccaacggcgacggttggaacctgacgagacaattcccggatttcactctcgccgagcagcgatccgagaagcacgatacccttcacacgatgggacaggaacgactcgaccatcgccctttcccgatcggccgaattgaaccccgatgcgaggtaggtttcgatcctggcctccgatgcttcgagaacgatgccgtccacgatgtcagccatgatggggttgtggagatcggaaacgagcacaccgaatgtggaaaagtcagccgccgcaaggcggctggcaataacgtttggacgatagcccatctccttggcgacctcgaggatatgagccgtcgtcttctcggagattttcggcgaacgtcttagggctaggctgacggcaccccgcgacacgcccgcgcgggcggcgatatcgtccattgtgaatcgacccatctgaaatcctctgcgacgttcttgcctcgataacaaatcgttcttgacatcgcaaggtaaagcgctttaacaatccaattaaagcgctttacctaagccgcttgtcagtcacggaggaggtgtccgatcgctgccgattggtggtcgggcagaatggcaagaatgatgaaccagtattttcgcaacgggggaatccccgattatctcgcgtcgcatagtggacgcatatcaattcccggcgcggagccgttctttatcgaaggaagctcaccgacagcgttcctgctgctgcacggatggtcggcgagtgctgagagcacacgcttcctggccgccggtcttgccaaggctgggcattcggttctttcgccgacgcttcccggccacgggtcatccgccgaggacatgctgaactatggtccggtcgactggaccagcgccgcgcgagaggccgcacagctgcttcggcgccattacgaccgtgtcattgtcctgggtatttccatgggcggtgctctggcaatccagttggcgggcagttcgcctgatctggccgatgcgctgattacggtgaacgcccctgtcttgatgtccaattcgtcattcgcggacgaaatcgtcagcggagacgcagcggattatctgtctggatggagcgtaccggagttctttggggaacacgtggatgaaatcagctatccacgtcgcttcaagaagagcggtgcggatctctattccatgtgcgccctggcgcgcgagatacttccaaaggtcgtgtgtccaacgctcgtagttcagtcggttctggacccgattgttcccaaggacagcgccgtcgaaattctgaacaccatcggcgcagctcaaaaacaggcgctttggctggaccaatcataccacgtttcgcagcttgacttggaccgcgaccgtatcgtttccgtcgcgcttgcctttgccgcggacagtgtcgccttggaacgcgcccagacgaccggtgcgtgctgagcgcatgaggaatgaatggggaggaccgggaggcctcccttcaaacaggtgaggagcggccggcaccctgttatcaatggccgcatcggaggagaacagaatgaatatgaagatcgttggactgttggctgcagtcttgtctctgggcacatccctgaccgccgcgtccgcggcaaatatcgcggtgatcgccggcaagccggacgatacgttctggcaacccgtcaagaaaggcgtcgatgatgcccgcaaggttgttgaactgaccggtggcaaggtctcgttcctgcagcttgcgaactatgacaatctcggtccggatgccgccaatctcgtaaggacggccgtcagccagggcgtcgatggtatcgtggtcgcgaactgggttcccgatgccatggatgcggcgataaaggatgcgatcgccaagggcgtgaaagtcatgctctacaatgccggcaacatcgacaaggcgcatgagcttggcgcgatgaactatgtcggcagcgacgaatacgtcgccggcaaggccgctggctcttacttttccgagaagaaatacaagaacgtactgtgcgtaaaccatgtcccgggctcctatcctctggagcagcgctgcaagggcgtcgtggacgcgatctcgcccttgggcggaaagagcaagcagctcccgcttccgtcgacccaggccgacaacgccgccgcggtggcgcaatccatcaaggccgccttgcttacggacccctcgatcgacgcaatcttgaccttgaacccggctgttgccgactgggccgccagcgggatcatgcaggcaggcatgtcaggcaagatcgcgcttggttcgttcgacatgaacgaggccggcctgaatcgcatcaaggacggaacacagaccttcgccatcgaccagcagccgtatctgcagagctatctcgccgtcggactgatgaacagctatctggaatacggtctgaacctgccgaccaatcctgtcctcaccggtcccggctttgtcgatagcaccaatatcgaagccacgctgggcggcgtcaaaaagggagcgcgctgacatggttgccatcatggatgcacaggcgacaaagccaccgtcaaaaccctcgcccattggtgcccttatccgccgtcccgagacggggtcgtttctaggcatgctcgccgtcttctgctttttcgtgatcttcggtcaggcgaacttcatttcagcggccggcgtggcaagctggctcaacgtggcagccacgctaggtatcgtggccctgccggttggcctgctgatgatcgcaggcgagttggacatatcgatcggttccatgatcccggcgggatcgatggtcttcgccatcatctcgggatatttcggactgcccgtctgggcgggcatgggcgcggccttgcttctcggcgtggtgatcggactgatcaacggcttcatggtgctgaagacatccgttccctcgctgatcgtcacgctgggcacgctcttcgccgtcgcgggactgacgctcagcctgtccgttctcataaccggcacaaccagcgttgccgtcgcaccgccaccgttcgtgaaatccattctcggtgatttcattggcggcatgttccaggtcaccatcttctggtggctgggtatcgccgcggtctttgccttcatcctgcattactcgccggtgggcaactggatcttcgccctggggggagacaaggtgagtgctcgcaacgccggcatccccaccgaacggatcacgatccttcttttcgtaacgtccagcgtctccgcctcgttcgtggggctgagccaggcaatcctgttcaattccgcacaggtgtcgtccggaagctctttcatcttcaattcgatcatcagtgtcgttgtcggcggggttctgcttaccggcgggtatggatcgatcatcggcatcgtcatgggcacggtaacgttcgcgatcgtcaaccaggggatctatttcacatcgttcgatgcgaaccttgcgagcctgatcatcggcgtccttatgctcatcgccgtgctgctgaacaacacgttccgcaagatggccctgtcctacagcagcaagaagaagtgaggatgagacatgtcgactccaatcatcaagctatcgaacatcagcaaatctttcggcccgatcgacgttctccacaacatctcgcttgaggtgaacgccggagaggttctctgcctgctgggagacaacggcgcgggaaaatcgaccctgatcaaggtgctgtccggcgtccacaagccgaatgccggcactctggagatggacggcaagccgatctccttcgacaatcctcgtgacgcaagcaatcaggggatcgctacggtacatcagtttggagggacctttccactgatgagcattggtcggtccttctttgttggcgtcgaaccgacaaagcggtttgggcctttcaggatctacgaccgcaaaaccgcaaacgaaaccgcggtcagggccgtgcgcgagtttggaattaccaggatcgatgacggtgataggctgatcggcggtctttccggcggcgagcgccagtccctggcgatcgccagggcggtgcatttcggagcgcgcctgcttgttctcgacgagccgacagcggccctcggcgtcaaggaggccgcgcatgtgctgcgcattgtgctcgaagcccgcaagcggggtctcggcgtgattttcatcacccacaatgtcgtgcatgccctgaccgttggagaccacttcgcggttctcattcgaggtgccaaggccgcggacttccgccgaggcgaaaagacccgcgaggagatcaccgacctcatggccggcggcgaggccatggcggagcttgaggccgagatcgccgcgcacaccaagattgcctgacagccagcttgcgattgattgttggcccgatgatgcgcatcgggccagaatcggacgcggctcgattgttcctgcgtctcacggcgggagacgattgctgccgtaagttttccgatccagctcgcggcccacgaatgccggaatggaataacctttgtcaccgacgtcaacggtcatatgcgggcaccgatcaaaaacgcctccagcatgatgccgtctgggccaaatttctgcgactgcttcgcacctgcagatccagctgcaactgcagttgcaaatcattgttaagtaatgatattttcgaatgtcgcgagtgatttccggttgacagccggggggcgacaccctaggtcatcgcgcatcggggagtagctaccgcttacccagcgggaacgtgtcaacatgctcgtgcgcaatgcacgtggcacgttcagccgaaaacgtcggctcggcaagaccgtggcgaagtctgccacctggacagggcagtcgacgcccggcttctatcgtccgcgaggtttcaagatgtcatttgttgcaattgtcgtgctggcattcagcatgtcgatggacgcgtttgcggtttccgtagggcgtggcgctgctcttgggcggacaagcgttagagacgccgtttggactggcgtcgtcttcggcgtggtggaagcaatcacgccaatgatcggctgggtcgccggcgtggcggcggcgagttatgtctctgccgttgatcactggatcgcattcggcctattggcggctgtcggaaccaatatggtgtattcggcgagcaagggcggtcctgaggaagagaccaagcccggaatgtccttcgttgttctcgtcgctaccgcgatcggaaccagccttgacgccatggcggtcggtgtgtcgcttgcatttcttcaggtcaatatcctggtcatcgctgccgcgattggagcggccacgttccttctctcgtccggcggcatgcttatcggacgtctgatcggcgagcgtttcgggcgaattgcggagggagtggccggcgttgcgcttatcgcattgggcagctcgatcctatacgagcacatttttgcagcgtgagatccggaaggtatctcgcaacagttgaggaacgccaacccaggtgcacgacaatggaccctgacagtcgaagtattagcccgatagtttgaggcctttcggagtccagtctccggggccgatatcccccaggagacttcaatgctacgtagttttttccgcgatgccgaacgcgtcgcaatgcacgacgatgtcgaaactttcgatgccggcgcccaatatatttggttcgacttactcagcccgatcccgacggaaacaaaatacgtggaggacaagttctcgatcgctatcccgacgcgggacgagatggaagatatcgaactttccgcccggctctatcaggaggacggggcacaattcatgacgatgaccatgcttgccggtttggaaggtgacgagcctattcgcacgccggtgactttcatcctcaaggaaaattgtctcatcaccgtgcgctacgctgacacgttgccgttccgccaatccacatcaagattgctaaagggcccggccgccatcagccttgcaggagagatggcgatgctaggtatccttgaagccgttatcgatcgaactgccgatgtgctcgaaagaatcggacgggagatcgatacaatttctcgcgaagtgttccgcagcaagacctccaatgccaccaagaaaacgcgaaatctacaatccgtgatcgagcagattggccagaagggcgactttctgaccgctgtgagcgagggtctcgtgagtatttcaagattggtggcttatcacgctgcggttgagcagccgggacgcaagatgtccaaggaaacgcgtcaggtcatcaagcttcttcagcgagacggcgcatcccttggggaccatgccgcctttttgtcgagcaagatcaattttctgctcgacgcgacgcttggacttatcaacctcgagcaaaaccagatcatcaagatcttctcggtggccgccgttgttttcctgccgcctacccttgtcgcgtccatgtacggaatgaatttcgaagtcatgcctgaacttcgctgggaatatggctacccctttgccattgccatgatgattgtatcggccgcgatgccatttctgtacttcaaacggcgcggctggctctgaactgctggtctcttgccaccggtttcgcatcgttccagatggccgatacacgatcggccgtcgtggagcgcgccgttcgcgaggaagagcagcttggttcttgcgaattgcaaaggactgaccggcgatatcattccactatcgccatcagtgctcgaacttcacgcctgcgtatgttgcgtgataggcaagcgacgtgttccacatagagttcattgagttcaacgaccggcactctcgtcacgtccttatcatcacgggtaaccgcaagctcgaacatgaatcctataccgacgccctgcagcacggcctcgtaaacggcttcgcgttctcctagccgcagtgccggctcgatctccagttccgaagccttcatcgccttctgcagcgcgttttgcgtcaaggaatgctcggtacggaaaatcagcggctgatctgtcagttcatgcattgataccggcttgttgcgtcgggcaagagaatggctgcttggaataagtgcgaccgcccgctgctccatataggggatgcggatcaaagcctcatcctcgggaactccggtcaggatgatggcatcgcagcgctgctcgtaaagcgccgtcgttacctgatgccagttgccgaaactggcgttgatccgcacgcccggatatcgacgacggtactccgaaatcagcgccatcgcggggttgggggcaccgcacatgacgttcagttcaccggttttcagcgcgctcgatgcgctcaatatgtcggttgccacttcctcgatgacgctgagttcccgggtttcctgaaacaggtttttcgcaagcagcgtcatccttgcgccgtcgcccgtgcgctcgaacaggagcacgccataactctgctcgatcgcctttatctgcgccgtcaccgccggctggctgagcccgagacgccgcgccgcggccgaaaagctcccctccttcgcaacggcattgaaggcccgcaactgggcatagcttagcttgggacgcatgggggaacctgatgtggggtataagctgaatttataatgcgtcatgcgcatgtaaaattcatgacatatcacgccgccatcgatgaactttcaggacttcaggcatggccggcgtaaacatcagatctgtcgctaagacgtttggggaaacccatgtgctcaaacgcgtcgatctcgatatccgcgatggcgaattcatttctctcgtcggcccgtcgggctgcggcaagtcgacattgctgcgcatcgtcgccggcctcgagcagcagacggaaggcaatatccttctcgatggcgagaccgtcgatcgcctgcggccgcgcgaccgcgatctcgccatggtgttccagtcctatgcgctctatccgcatctgacggtggccgagaacatcgcggtgccactgaccatgcgccggatgtcgacgctggaccgctcgctgctcggcggcctgctgccatcggccagggcaaagcgcaaggatatcgccgccgaggtgaacaaggtctgcgaggcgctttccatctccatgctcaaggatcgcaagccggccgctctttcgggcggacagcggcagcgtgtcgcgcttgcccgcgccatggtgcgcaagccaagcgccttcctgatggacgagccgctctccaatctcgatgccaagatgcgcgtgcaggcgagaggagagatcgccgcccttcatcgccagctcggctcgaccttcatctacgtcacccatgatcaggccgaggccatgaccatgtcggatcgcatcgccgtcatgatggggggtgaaatcctgcagctcgatacgcccgaccaggtctaccagatgccgcaggatctgcgtgtcgccgaattcatcggcagcccgaagatcaacgtcgtcaaggccatccggcgggatgacggcgctctctctgttgcgtccgagaaaacagccggccagagcatccatgcggctttccgcccggaagccgcgcggttgacgggcgaggcagaggcgccgctttccggcatcgtccaccatgtcgaaaatctcggcgccgatctgttcgtgcagatcaggctcaatgatggtggggatctggtcatcgtgcgctgcgatcccgccggcatacgcccggtcatcggtgatcgggcgggtatcgccatcgatcacgcacggctgcatgctttcgggtccgacaatcgccgcatcgatggcagcttccggctggaggccgcgtaatgagcctgtccgccagccagaacagggcggggctgacgctgatcgcgccggctgccattctcggcctcgtcttcctcatcgcgccgctggcgtcgatcttcgtcctcgccttcaccgattatcagctcggcgaccgcgcgctgagcttcatcgggcttgggaatttccgcgcgctcgcggatgacccggtcttctggcgatcgctgagcaacacgctgatctattcggccgtcgtcgtgccgggttcggtcctgctcgggctcgtcagcgcgctgctgatcgattcgggaacatcgctccgttccttttaccgtaccgccttcttcctgccggtcatggcaagcctgctcgccatggcgatcgtctgggagttcatgctgcatccgagtttcggcatcgtcaacgcggtcatgaagacgctcggatttgcgccgcgcaattggctgaaggatggcagcaccgcgctttacgtgctggcggtgatcggcatctggcagagcttcggcttcaacatggtgctgttcatggccgggctttcggcaattccgcgcgacctttacgacgccgccgaaatggacggtacgccgcacgcctgggcgcgcttcaagctgatcacctggccgctgctggcgccggtgaccgtcttcgtcgccatcacctcggtcatccgctccttccaggtcttcgataccgtccaggcgctgacgcagggcggacccaacaaggcgacggaggtcctgctctacaccatctacgcggagggtttcgaattcttccgcagcggccgggcggctgcaatcaccgtggtgttcatcatgctcgtcgtcggcgtcagcctgctgcgtttcctctccctcaagaagaccggatcgaacgcatgaccagcggctcgtttgtcacctcgacgctgcgccacgcggccctgctgctgatcgcagccttcgccctcatgcccttcgcggtcatgatatcgacctcgatcaaacctgcgaacgagatcttttccgataccgtgcgctggtggcccgaaaagctggcgctgatcgaaaattattccgaggcgttctcctccgcgccactgatgctttatctgatgaacggcgtcatcgttacgctggccatcttcttcctgcaggttctggtggccctgcctgccgcctatgcgctggcgaaactgcgcttcgtcggccgtcgcatcgccttcggtttcgtgctcttctgcctgttgatcccctatcacgccatcgccgtgccgctgttcatcctgctctatttcgtcggcctgctggacagttacagcgcgctcgtcctgcccttcacgatctcggtcttcggcattttcctgatgcgccagttcttcatgggcgtgccggatgatctggtcgatgccgcgcgcatggacggaatgtcggaactgtcaatcgtctggcgcgtcatgttgccggccgccattccggcgctgaccgccttcggcgtgttctcggtggtggcgcactggaacgattacttctggccgctggtggcggtatcgagcgaaagctacttcactccgccgcttggcgtgatggccttccgcaatgccgaggccggcaacaatttcggcccgctcatggccgcagccacgatcatcgtcgcgccgctgctcgtcgtgttcctgctggcccagcgccgcttcatcgaaggcatcgccttcaccggcatcaaataaccacccctcccacccgacccactctcaccggagacactatccatgcgaatgatccttacagccgcagcgctgtcgctgacggcatccatggcgatggcgcagacgaccatcaccgtacagtatccctacccggaactgttcgatgaaacccaaaagcagctcgccgaagcgttcagcaagaagaaccccgacatcaaggtcgagtttcgttctccctacaaggaatacgaggatgccgcccagcgcgtgctgcgtgaaggcattaccggcaatgttcctgacgtcaccttccagggtctgaaccgtgttcgcgtgcttgccgacaagcagatcgccgtagcgctcgacgatttcatcgccaacgaaaaggatttcgacgctgccggttatcacgaaggcatgcgtcaggccggcgccgtcaacggcaaggtttacggcctgcctttcgcgatctcgctgccgatcgtctattacaacatggatctggtgaagaaggccggtctcgacgcaaacagcctgccgaagacctgggacgagatcatcgagcttgccaagaagatcaacgctcagggcgaagcggacggcgtgatggcggaatggtccatcaccggcaactggctgtggcaggctatggtcctcgccaatggcggaacgatgctcacggaagacgagagcaaggtcgcgttcgacggtgaagccggcaagcaggcaatcaacacgctcgcgcgtctggcgaccgaagccaagtcaccgaacctgacggccaacgacatgctggcggcgttttcggccggcaagatcggcatcatggtcaccacgacatcgcgcgtcaacgccgttacaaagcaggtcggaagcaagttcgaactgaagaccggcgaatatcccgacatcaaggacggcgtgacccgcctgcctgccgggggcaacgttgcgatcatcacggcgaagaccaccgagaagcagaaagccgcttgggaattcctgaagttcgcgaccggcccggaaggcggcgcaatcatggtcaagaccaccggctacatggcgcccaacaacaaggccgccgatcttctcaaggatttctatacgcagaatccgaaccaggctgtcgccctttccgagctgccttacctcaccggctggtacgctttcccgggcgataacggcctgaagatcaccgacgtcatcaaggatcacatgcagtcgatcatggatggcacccgcgccaaggagccggaagccgtgcttgccgaaatggcgtccgacacgcaggcgcttctgccgcgcaagtaagccgtcaacatgacgccgcgcggtcaatccttggccgcgcggccccttatctcagggactgcacaccatgaaaatcgtccatatcaccgatacccatttcgttccgcagccggccacgctctacgggcttgatccacgcgcccggttcgatgcggcgatcgccagccttcaggctgagcattcggatgccgaccttctggtcatcaccggcgatttggcccactggggggaagtgccagcctatcaggcgctgcgccagcgtctcgaggcggtcacacttccggtggtgatgatggtcggcaatcacgatgatcgggcctcgcttcggacggtgtttcccgcagcaatggatgacggcaacggtttcgttcagggtagccgtgtcgaaaacggccaccgcctgatcttcctcgataccaagtgcgagggaacgcatgcgggcgcctattgcgagaagcggcgcgcctggcttgccgatgcgttggcgaagggcgacgagcccgtcctgctattcatgcatcatcctcccttcctctccggcatttcgtccatggacgcgattggacaactggatgccgatgccctgtggctggttctgcagccgcatgcgcggcgcatccgccatatctttctcggccatgtgcatcgcccgatctccggcaattggcacggcatctcgttttcgctcattccgggcctcaaccaccaggtgccgctgcaacttgcgccgcatggcgaggatattcccggcagccacgaaccaccggcctattccgtcatttccgttggcccggacagtatcgtcgtccacctgaaatatttcctcgacggctcgcggcgttttccgctcgatggctacgaggtcaagggccgcgactatgcgctgggcttcccggcctgcgaaggctgaaaccaaatcaaatcacgccattcaggcgccgacgcggacaggcgactgtgtgcgaaaggcccagcttattccggtttcccactcacatgcatgaattccacggcatagacgccacgcttttcgatcttgacggcactctggtcagcggcggcatcgcgcttccatgggcgcatcaactcatcgaagcgagcaaggggcattttgcgatcgtcacgaatgatgccgagcatacctccgcggagctcgaatgcctgatgcagatgatcggcctgccgatcaagcaagagcgcatcgtgacagcggggatggaagccatcaggcgggtggctgaagacatgcccggtgcaaaaatcgccatggcaaccagtcgctcgctgcaggcttacgcgaggacttgcgggctatatgtgacggatgccggccccgatgtcgtcctgatcggtcgtgaccgccaattttcctacgacacgatacgcttttcggcaaatgcggtgcttgccggtgccaagctcgtcgtctgcaatcccgatcggacgcatccaggcccgaatggcacgatcgtgccagagaccggtgctctcgcggcttcgattctggcttgcaccgggccggtggaacatcgcgttatcggcaagccgcagcctgaaattttccttgccggactaaaactggttgatagcgcgccttccagaaccctgatggttggcgacaacccggagaccgacggcaagggggcggagcgggccgggttgcggttcttgaaggtcggttgaccgcagccggtatgagagtgtcggcaacatccgagcgtcttcgtaagagctctttgatgacgcggcgatcgtctggtttgcaggtatgctcggccacgcccgcgtaaagagcaaacgtgactcgacgagaggccagccccgaagtgggaagctgcaactcaactgtattcagactgcgattcaccggctttttcgaggagcgagccgaacttcgcggagaattcctcaggggtgaattcatccgtcgatcccccaagcgtgatggctcccaccgggcgttttccttctcccatgatggcgacggctatggcgacctcgtgacgctggagctggcggttcgagatcgaatgcccgcgaacgcgcgtctcctcgaccgccttcatcacctgatccagcgtcgtgtaggtgtcgggtgtgaacggggtcgtgtcggatcgcgcgaatatgtcggcgatctcctcgtcgggaagccgagccaggatggcgatgccgcccgaggtacaatagacggggacggaatgtccggtcagcgttccgacaaaaagttcgtgctccgacggcatgcgaatggcatagatgatgcgcgtgtcgtcccagaacgacatatcgacacggacgtcggcacgtcgccgcagttccagcagggcgggcgtcactttctggcagatcggattgagccgcaatcccgagtaagccatggtcaggatgcgcttcccaggaaggtagccggtatcgtgcgcgtcgcgaacgatcatgccaagctggaccaatgtgtggacgatgcgttgtgccgcgcttctgtcgaggccagccatctgagcgatctcggaaagagacagcggcttgggcgcgagctcgaagaccgacagcacggcgaccgcgcgcgcgacggctctgacgaaaagtgcatcgtcggcgaacttgtccgcttcgtcaggatcaaatgtcgatacgccgatcagctttcggaacatgtggcctccccccaataaactcgaaaaataagcgttgacagcaacaaacgtcacggccaatattaacaaatacaactgtatcgtctagcaatacagtacaattgtttttgtgaggaggcaagagcaagcagcaagaatttccaatcctgactgaatagcctgacggcgggaaaatccgccggtcggacgcggggctttacgcacggcggcagaattgccgcgacctgcgcgggccaccagtgaaggattggctctacgtcacatcaatgaaatcaacataaaaagggaacgaaatgatggatgaaatgaaaacctcgaatgccggttctgacagctacgtgtcttcgcgcgatcagttcgcgcttggccgccgaagctttctcgtgggagccgcggctggcattggagcaggcttgatcggcctcccggcgcttgccgaggagaagccgaagaccggcggcaatctgaagctggcgatcgggggcgcgtcatcgaccgattctctcgatcccgccacctatcagaccatgttccacgtcgtgctggctcgctcctggggcgatacgctggtcgagacgcaccccgaaaccggtgtcgccgtaccgtcgcttgccgaaagctgggaagaaagcgaaggcggaaaagtctggcgtttcaagatccgcaagggcgtcgaattccacgacggaagcaagctctccgtcaaggatgccatccgcacgatccagcggcattcggacgctgcctccaagtccggcgcgctcggctatctcagcgatatcgcgtccatcgaggccgatggcgacttcatggtcatcaccttgaagtctgcgaacgcggacatgccgacgatcctgtccatgtacaatctcgtcattcagcctgacggcggctattcgtcgccgaccgccggtgtcggcaccggcccctacacgatgacgaacttcaacgcgggtgtccgcgccacgctcaagaaggcggccaacgactggcgaagcgatcgcggcttcgtcgagaacgtcgagctcctggcgatgaacgatgtctccgcccgcacggcggcgctggtctccggtcaggttcacctgatcaaccagctcaatccgaacaccgtgggcatgctcgagaagaccggacgcgtggtgattttcaacacgccgggccgcatgcactacaccatgccgatgatctccaacaaggcaccgttcgataacaacgatctgcgcctcgccatgaaatacgcgatcgaccgcgaagccgtggtcaagcaggtcttgaacggatacggatcggtcggaaacgacatcccggtcaattccctttacgacaatttcccggccgacctgccgcagcgggcctatgatcccgacaaggcagccttccacatgaagaagtccggctttaatggcaccatccagctgagcgccgccgacgtgatggccggcggcgtcgatatggcgctgatcttccagcagagcgcgcgcaaggcaggcatcaacgtcgacgtccagcgtgttcctcaggatggctactggagcaatgtctggcgcgtgaagcctttctatctttcctactacggctcccgcctgacgcaggacatgatctactcgatggagttcagccgcagctccgcggcgaacgagtgcttcttcgacaacgacgagttcgagactttgcttgtgcaggcgcgtggaacgacggatgcctccttgcgtggtgaactctatgcaaagatcgccaagatcgttcatgaacaatcgggaaccatcattccggtgttcatcaacttcatcaatgcggcgagcccgaagctgaagggctacaagccggatgtcggaaacgatctggcgaatggctatgtcgcttcgcgtgtctggctggaagcgtaagtaatggctggaatgcacgcgatgagtgattttgacatcgacgcagccgtggcggacatctttcgccgatcggttatctgggacggccattcgggtttcatgcccgatccggccgccgatctcacgcaactgagccgctggcgggatgccggtgtcaactatctgtccgtggacgtgtgtttcgatgctctggaatggcagagtgccattgcaaccatcgccgcctttcgtcgctggatcgatctgaacgccgacaagttcgtccttgtctcgtcggtccatgacatccaccgcgccaaagccgagggcaagatggccatcacattcgatctcgagggcgcgaatgccctcgatggtcgcatcgaaatggtcgagctctatcatcgcctcggcgttcgccagatattgtttgcgtataaccgcaacaatcaggccggtggcggctgccatgacgaggatgtcggcctgacttcgttcggccggcagatggtgagtgagatgaaccggctcggcatctttgtcgatgtcacgcactgcgcctatcgcacctccatggaggcgatggaatgctcttcacagccggtcatcttctcgcattccaatccgcgcgcgcttctggatcatgagcgcaacataaccgacgagcaaattcgcgcctgtgcggcaacgggcggccttgtcggcgtggtgggcctggaaaatttcctcggcgaggacgcgtcaccggatacgatctgcaaccacatctgctatctcgcggatctggtggggccgcagcatgtcggcatctcgctcgaccactccttccccgtcgatgttccgcacgctcacgcgatgttcgagacgttcccgcaatactggccgctgtcgcagggctatggccgccccaaccgtcagcaggcccatccgggggatctggccaagatctgcggcatcctcttgaagcgtggcatgtccagtcgcgatgtcgaagcgatcctcggcggcaacttcatgcgtctggcggcacaggtctggcgctgatcggcgcctctcctgtctctcaatccaaaaaggaacgttgatgtacccgatgatccttcggcgtattttgctcagcgccgcgttggtccttgctgtctcggtcgtgatcttctgcggcgtaaacgccctcccgggggacttcgcggcgacctatctggggcagtcggccacaccgcaggcgatagccaacatgcgcgcggagctgggcctggataggcccgcgacgttgcgctatttcgaatggcttggaaacgcgatcagcggtgactttggcaagtcctggtcgagcggcgccgtcatttccgaacagatcggccagcgcctcggcaacaccctctttctggccgcggcggcggccgtgatcgccgtgcccttgtcgatcgtctgcggcatgctcgcggttctttaccgcaaccggtggccggacaagctgatctcggtcgtctcgctgaccgcgatttcactgccggaattcttcgtcggctatctgctgatcctggtcttttcggttcagttcggtgtctcgtcgttcccctcgaccgtctacgacggaatggacttctcgcagcgcattgccgcgatcgtcttgccaaccgtaacgctcgtcttcggcatcttcgcgcatatgatgcgcatgacacgcgcggcgattttgcaggtgatgacgtccgcgtatatggagacggctgaactcaaggggatcgcgcccttcgtcgccatatggcggcatgccgctcccaacgcccttgcgccgatcatcaatgtggtggcgctcaacctggcctatttggtcgtcggtgtcgtcgtcgtcgaggtggtcttcgtctatccgggcatgggacaatacatggtggatgcggtgacgatgcgcgacatgcccgtcgtgcaggcctgtggcctggtgttctccgccatattcatcttcctgaacatgcttgccgacatcttgtcgatcgcgctcaatccgaagctgaggcatccacgatgaacctgcgccaaattccattgtccgcctgtatcggtctggcggggatcacgatcttcgttttcaccgccgcgctggctccgctgcttgctccctatcagcccgacgccgtcgtcggttcggtctggcaggcaccggatcaatcgttcctgctcggcctggacaatctcggccgcgatatgctgtcgcgcatggtctacggcgcgcgcacaaccctcgtcgtggccctgacggcaaccgtcgccgccttcgtcatgggcgtggtgctgagcttccttgcggccgtctgcggcggcgtcgtggatttcgtcgcctcgcgcatcaacgacgtgctgatgtcgctgccaacgctgatccttgcgctggtgatactggcggtgttgccgcagagcacgctcgtgctgatcagcgtcatggcggtgctgggcgcctcgcgtgtctttcggttggggcgcgctatcgcgatggacgttacggtcatggaatacaccgaagcggcgcgtctgcgcggcgaaggtccgttctggatcgtgtttcgcgagatcctgccaaacacgctggcaccgctgctcgcggagttcggcctgcgcttttcgttcgcggtcctcttcctgtcgacgttgtcatttcttgggttgggtatccagcctcccgtggcggattggggaggcatggtgaaggacaacaaggatgggatcatcttcggcatctcggcagccctgatcccgggcggagcgatcgcgattttgacgatatgcgtgaacctggtcacggactggggcctgaacctaacctccagcttgaaaggcggacgtggcgatgtctaggcttctcgaaatccgtgatctgaagattgaggcgacgagctatgctccaggcgagcctccgcagctgatcagcattgtcgaaaatgtctcgctgcagctggagcaaggcaaggtgcttgggctgatcggggaatcgggcgcgggcaaatcgaccatcgggctgtcgtcgatggcctatggtcgcggcggaatccgcattgtcggcggatctgtcaagttggccggccaggaattgctgaccgccagaccgggtgaaattcgcaggatccgcggtgcgcgcgtggcctatgtggctcagtccgcggccgcggcgttcaatcccgcccatcgcctgatcaagcaggtgatcgaagtctcggtccggcagggcctcatgagcgaggcggaggcgcgcaggcgtgctgtcgagctgtttcgcacattaggcctgcccgaccctgaaaaatttggggaacgctatcctcaccaggtatcgggaggccagctccagcgtgcgatgacggcaatggcgctttgccctcgaccggagctgatcatcttcgacgagccgaccacggctctcgacgttacgacgcagctcgatgtcctggccgcgataaagcatgcgatcagcacgacaaaggttgcggcgctctacatcactcatgatcttgcggtcgtcacgcagatcgccgacgaaatcatggtgttgcgaaacggcagaacggttgaagtcggcccggtggagcagatcatccacgcgccgagccaggcctatacacgcgatctcgtccatgcgcagaaaaccagcaggggcacggtcgatgtaacgtcgcaagtcgtcttgaaagccgatcgtctggtcgccgggtataacggacttccagatacggtccgcgatgtcagctttgatctgaaaaagggccatacccttgccgtcgtgggcgaaagcggctcgggaaaatccacgcttgcgcgcgtggtcaccggcctgttgccggcgcactccggcaacatcgagttcatggggaccgcgctcgcgccaaggctgaagcagcgcaagacggatacgttgcggcgcatccagctgatctatcagagcgcggacaccgccctcaatccgcgccagaccgtcggtgacatcatcggccgccccatgaccttctacctcggcctgcgcggaaaggcgcggcgggcgagagtgatcgaactgcttgagcagatcgaactgggcgagcgcttcctcaaccgctatccggcggagctctcgggcggtcagaaacagcgcgtggcaatcgcgcgcgcgctggccgccgagccggatgtgatattgtgcgatgaaccgacatcggccctcgatccgctggtggccaagggagtgctcgagcttcttctcaagctgcagcgcgagcgcgggctctcttatgttttcatcacgcacgacatcgcaatcgttcgggcgatcgccgacagcgtcgcggtgatgaggaacggccagatcgtgcggtacggaacgagcgccgaggtgctgtcaccgccattcgacgattacaccgaccttctcctgaaatcggttccacagatgcatcagggctggctggagcaggcgctcagcgaaagggtgctcgctccagcggaccactgagcgcgcgccgaacagacattatgaacaaaaggaagaacgtgatgagcgatacgccatcgtgggcattgagtgcgtcgtcgctggcgaaggaaattcgggatggcgtgctgtcggccaagagcgccgcacgctcggcagtagagcgaatgcgcgctgtgaacggccattacaacgcggtcgtcgatgatctcggcgatgccgccttggaagaggccgccgcgcttgaccggctgatgtccgagcgaggttctgtcggaccactccacggcgtgccggtgaccgtgaagatcaatgtcgaccaggcgggttatgcgacatccaacggcgttgcggctttcacctcgacgatcgccgataccgactcgcccgttgtccgcaacctgcgcaacgccggtgcgatcatcatcggcagaacgaacacgcccgagttctcgtttcgggcaacaacggacaatccccatttcgggcggacgataaacccgtggaaggaaagcgcctcgccgggcgggtcttcgggaggcgccggcgttgcggtcatgaccggcatgggagccttggcccacggaaacgatctgggcggctccttgcgctaccccgcggcggcgacaggtgccgcaacgatcaagcccggtctcgggcgcgtgccggcctataatgcgtcggccggcaaagagcgtggccttcttgcccagctcatgtcgacgcaggggattctcgcgcgtcaagcgggtgatctgcgccttggcctgcaagcgctgatcgcctacgatccgcgtgatccctggatggtgccgatggaattccgtggcccgtccagccccgaggcgaccagggtggcggttacaagggatggccttggcttcggattgtcaccacagacgtcgaccgcattggacaatgcatgcgaggcgctgcgcagatccggatacgaggtggttgaagtcgagccgccgctgttgcgtgagtgtggcgacaccgggtttcgcgcgctgatgagcgagtccgcgaaactgttgcagccggacatccagagatttggaagctcgcaactcaaccagatcttcgagaaccatttgcaggccttcccgcccttttcagagggcgagcttctgagggtcatggcgcaacgcagttggttcgtgcgggaatggctgatgtttctggaacagtacccgctcttgctcacgcccttcatgcttggccccgttcacgactggaaccgggacgccgagggtgtcgaaggcgccgaggacgtgttgggcagagggcaatatagctacgcgatgaacttcctggggctgcccgccggtatcgtttcagcgcattttgatggcgggatgccggtcggtgtacaaatcgtcggccgccgcttccgagaagacatgatcatcgacgccctggaagccgtcgaggcctatgctggtacggtgttcgagcgactttggaacgggatcgattccttgcagacaccggaataggttctatccggccgatggccttgcactgtagcctccacaacgatcgcgcgtggaggtttcttttgtggcgcggactgggtcggtggcctgcccagccgttcgataaatcctatggcgcaggtcaatcggcagcggcgcgcctccgcgactttcagcggctatgcgttcctcggctgggccacgtcctcaaggccctcactcaacggcggcggcattcgcgttcgaagtcgcgtaagccgatagtaccgtcggaatggtcttgacgttatactcttgcagttgcgcccgggtgagttggtttgccaattcgcggtgcctgcttttcagcagcgcttcacggatcatcgggcgcgcgtccttgaagcttatgcgtttggcttccgtcttctccagcatctcgatgatatagatgctgccggcgatctcgatgggcgcattgggcttgccagggtcgagtttcatggcggcctcgtggagaggatgatcggcgatgtcggcaaacggattgttgttttccccaatccatccttcgaacatgcccccattcgccccagcctcggtcgcctccgaatagtcccgcgcgatatcggcgaacgtgcccgccgacccggcaagctttgaataggcctcctgtgcccgcacccgcgcccgagccgcttcgtcttcgctgccgccgaggcctatcctcatatagcgtatccgcgctttggcagcagagaggatctgcattctgttgcgcgcgtaaaaggcctcgatctcggcttcggagacatcgaccttgtcgtcgacttcctctttttcccgcatcatcttcaaaaggccgatcctggcttcgtcggacatcgatttgttcgtcacgtcgacaagcttgtcgtatgtctcgctcaccagcagcatccgatcgatgatgctgtcggcaagcgtcctcataccggcggcaccggcatatttcgtccgcccggcctcgggaagctctccatattccgtgtagaactgggccagagtgtagcgctggcctttcaacgtgaagagaaccttggcaccgttatccgcaaaccattgttcctgcctgcgccggttagcctccgcgaccacgccctgtctcacttcctcgagagcttgctgccgggccggccttagttcgaccagccggactacataataggactcgcccgcgcgaaacacgcttgccatatcgcccggcatcagcgcgaagacattggcatcccatcccggcttcgattgaccttcggcgatttcacgcgcggcctcgaggcgcaggtcatcgtcacgctcggcgacctcctggaaagacgcgccgccacggattcgcagcagcacatcgtttgccttggactggctcgcatccccgaaaaccgatatcggcacctcgatctggtcgaccacggcgcgcttcggcagcgcgtatctggcggtatcgccgcgatagacggcatcgatctcgtcctggctcggcggcggtacgtcgagaagttcgaaattgcgttccaccgaagaattgcttcgcagccgctgcagataggcctcgatatactcgggggctttcttttccgcgagcgtgcggcggatctcgtcgcgcactgacatatagtcgcgaccgtcgaacgtcgcgcggttcccgtcgtaatagccgcggatttcgctctccgtgacgacgatatccttttcctggatctgcttggacagcgtatcgaggccaagcttttcgtccgcatgctgcacggcatgctggaaggtcgcgtccgtctccggtttgcgttgcgaagcccactcgaggacgagcttgtccgagatcatttcctcgaccatcagcagcaattgcgcagacgagcgcttcacctcgttttggcgcgccggcggcagcaccttgagatgctcctccatgtccgcaacggtgatttctccaccgtcgaaggtcgccacgacatcggaaagcgcgggtttggcaggcggcacgaagtaggggatgagaatccaggccgctatggaaatgaggatgacgcaaacgaccgcggtgaaggccaggaccggcaggattttggcgtcgtgcttttcggaatcgggcgccttcgcagcagccaatggaggctggtccggtggggaaccatcgtcctcggccgcagccgtagccgtagccgcgtctgtttggcggtcgtcgtcatccgttcgttcggcgccggcatttccgctcgcctgaccaaaacgcaggctcgccagcagatccgcccaaacctgactccagccctgtgccatgttacctctgattccttcgtatcgacggcgcgttcttggcggcatcgccggacagtctcaaattgaatttgccgcctctggacgtatcgaccgtatagacctgtacccgcggcatgatcttctcgatggtttccagatacatgcgatagcgggttacatcggcgccgttggccgcggcgttcctgcgatattcggacagaaccgattggaaggcatccgcaccgccattggccctggccagcacatcggagcgataggcctcggcatcggccttgatctgctgcgcctggccgcgcgcctcggggatgaggctgttcgcatatccgcgcgcctcgttgatcacgcgggcccgctcctcgcgcgccgtattgaccgccgtgaacgcgtcggcgacatcggcgggcgggaaggccttctgcagatcgatgccgacgataacgagcccgctgcgatattcatccagctgccgctgcgtttcctcgcgaatggcttcctgcagcgactgcctgccgcttgtcagcaacgcgtcgacaggcagattggtgacacgccgggtgacggccgctcgcagcgtgtcgcggacgatgcggtaaggcgcgtagcggatgttgaacagatagtcggcggggctgcggacctgatactggacgatgacctcgacgttggtgtcccccgacagcgtctgcattttcgacagcggctcgggatgcagatgttcctcttccggcaacaccacgccaacctgctcacgccggatgttgctgacattgacgatatcgacctgatcgatcggccagggcatgcgatagtgcagacccggttcgacgcggggaaggatgatctcgccgaaccgacgcacgaccgccgcctcgccgggcgccacggaatagacgccggtcgaaacataggtcacaagcgcgatcgccagcgcgccccagaggaccagggccgggcggatgtgaccgagcgccgtgcgcaggtcggatagcggcgattcaggattggtggcgaaccactgcagaaaacgcaggacagctcccgtgacgccgccgcgtcgcgcgcgttccgcatccggcgaagcggcgtccgcgtccgccctgtccgtcctgacgccttccccggtcatggccgcgtctccgtcgtcggcgttgccgtggttccgagcgcgctgcgcgggtcgagatagcgaagcagttccgaatccgacggcaggatcagcgtcgtgccttcatcgatgaatttgccgtaggattcgagcgttcgggagaacttgtagaattccttgtccttgccgaaagcctccgcatagatgcggatcgcgtcggcatcggcgcgtcctcgggcttccgccgccgactggttggcggttgcgaggattcctgccttttcggcatcggcggaggcccggatcttggccgcctcctccgtgccttcagagcggaactgccgggcgatcgcttcgcgttcggagcgcatgcgctggaacacgctcgtcaggtttgcctgcggaaatgtcagttccttcaactgcacatcgacgacggtgaaaccatagggctccgtgcgggatgccgctctctggcgaacggtcgcgagcgtgtctggcaggcgcacctgcgcgggatcaaccgtcaccaggagactgagatcgacctgtcccaacgccgcgccgatttccgaccggatgatgtcgttgagccggacgtcggcggactgcagatcgcggacgtttttcaggaaggcaagagcatcggtcacttcccaggtcgcataggcctcggcgacgatattcttcttgtcgccactgagaaattccgtgcgcggcagattgtagacctgcacctgcttgctgatcttcacgacactctggaacgggtcgggcagcttcgcataaaggccgggggcggtgacgacgcggacgggatttccgaactgcgtgacaaccgcgttttccgtggtgtcgacctggaagaagaccaggctgaccgccagaaatccgaaagccaggaggccgagtgcgaatatgcgaaaaagcttcataaaaggaaatcccgatggttacggcgccggcggaaacggctgcatgccggccggccggccaagccacagatccgtcgtttccggcgaaacccgtgggtcgaggatcagcttgtaggctccggcgagcgctttttccgctgcctccagatagagacgctggcgtgtgatgtcaggcgccgccgcgtaggcggcctggcgggacaggaaactcgccgtttcgccggtcgccgccgctgtccggctggccgtgtaggccgctgccgcctgaatggtcttgttgccctcgccccgcgccagcgggaccacttcgttgcgataggccagcgcctcgttgacgaaggtgttgcggtcttcgcgggcgctcgcgacatcgcggaacgcttccgcgacttccggcggcggtgcgctctcgagcaactgcacgccgacgatgcgaagaccggaacggttgcggtccagcacgatctgcatcgcctccgccgtgcggttctcgatcgccgccttgtcgagcgtcaaaagcagatcgactgcctcgcttgctacgacctgccgcaaggtggcggtgcccgcctgcatgacgagatccgcgggattggcgacattgagcacgaatgcaaccggatcgctgacgacgaaatgcaggctggcgcggaccgagacgaggttctcgtcgccggagagcatctgcatctgcggcatcaccatgcggcgaacctgatcgacggccacgatatcgacacgctccagcggcgccggcagacgatagtgaaggccggggtcgttctgttcgacgacctgtccgaaccgcctgacgaccgctttttctccgggcaatatgacgtagaagcccgaaagcatgtagatcatcacgaggagaacaccgacgatcggtccgtaggcgcgccaccagccgcgttgtggcatatgcgaatggcccgcttcaccttcgatatcgacccgacggtgctgtctcagagccgtaatggcggaagctgcgacctgatagcccgacaggaaaatcatcaccgcgacgatggccgccgccgccttgtcgaggttcggcaggccgagcgccgctccggcaaggccggtgacaacgacgatggaggcgtagatgtcgatctgcgaatgatagccgctggccgtcagagccggtgaattcgtctgccggccgacgtagagcttgtagcgcgccacgacataggtgatcaccaccgtcagcatcgatgccagtgtgatcgtcgtaatgttgcgcaactcgaccggcgcgtcgttgagcacatcgcggacgatgtcgagcccgacgtagaagatcgccacggagatcgctatggccgtccagttctcaaccgtgcctgacctgcggcccgccttgacttcccgacggctgatgaacaggccgacgaggacgaagacactgattgcgacatccgtcagcgagtgaagcgcgctggagcgcaaggagaggctgcccgatgccgacgccagccagaacttcagaagtacgagcaagccgttgatcaggatcgtcaggaatatcgtgcgttccttacggttcatcgttcatcgaacctctcgcgggaagcccgctttctgaggacaggcagtcgctgacatggccgcagccttactcgacttcaaaagatgtcctcgtgaactcaactctccgcaatcccagaccgaagcggttgcggacgaggcgcggtatgacagaacccgcgaaaagtcaaaaatcaattgcgtgatttccgccagtgcgacagtttgccatcctcattctacggtgtcgatcgaccgcgggataggtatcccgagcgctccgaagccgccagggcgcttgatgaaatcgttatcgaacatctcggacagatcgaccccaaagggctttgcccgtgggtcggatgcgaggcctcggccgctggccgaattcgcaagttcatgcgcacagaacaacgttttcgaaacgtcggccaactcatcgtcggctactggcgtcgaacatcctcctgaccgcgccagtgtcgaagcgacgatgaggtgcggctgcccatcctagctcgcgccgctgacgctctccaacgccttcctcaactcgtccagtccgtgtggcttcgtgagcaggacggtcctggacggatcgtccatgtcgggcttcttctccgaacctgtcgcgaaaacgatgccgatctccggccaacgcttgcgaacctcgcggcagaaatcgtctccggacattcccggcagcccaaggtcggtcaccagaacgtcggtatttccggcctccagcagaggaagcgcctcctcggcggactcggcttcgaggacctcgtttccgagctcggccagcatgtccgcggtcgccatcctgatcagcgcgttgtcctcgaccagaacgacccgaagaacctgcgacgtggactgcgggataggcgcgggcacggctgaaatggacgtctcctttcggcgctcgacgttcttctgcgtttcgtcgatgacatgccggatcttgcgggcgagcgcctcgcgtgtgtagggcttggacagcagctgcacgccgggatcgagcctgccgccgtgaacgatggagttttcggtgtatccggaggtgaacagcacggcgagaccgggcaggcgctccttcgccttctccgccatttcgctgctcttcagcgggccgggcatgacgacatcggtgaagagcatgtcgatgtggatgccgctttcgatgaccgagagagcggcggaagcgtcgccggccttgagaacacgatagccgagttcctgcagcatttcgaccaccgtcgtgcgcacgccctcatcatcctcggcaacgagaatggtctcgggcccgccctcgacgggcgcatgcgggtcgacgacctgcaggtcttcctgctgatgcgaccgtggcagatacatcttcaccgtcgttccgtgcccgacctcgctgtagatcttgacgtgaccacccgactgccggacgaaaccgtagaccatcgagagaccaagcccggttccctttccttccgccttcgtcgagaagaagggctcgaacaccttgtcgatgagatcgggagagatgccggctccggtatcggtgaccgagatcgacacatactggccgggcacgacatcctgatgctgccttgcataagcgtcgtcgacgtaggcgttgccggcttcgatcgtcagattgccgaaaccctccatcgcgtcgcgggcattgatcgcgagattgaggagcgcgttttcgatctgcatcggatcgacaagcgtgttccacagcccgcccgagaccaccgtttccacttcgacgccttcgccgatcgtccgccggatcatctcgtccatcccgcggatgagccggccggcattgaccacgcgcggatcgagcgcctggcgtcggccgaaggccagaagctgggccgcaagctttgcgccgcgctccacgccggccagcgcgttggtgatcttgcgctgcgccttgtcgttgccgacgacatcgcgtgacaacagctggagattgcccgcgacgacctgcaggagattgttgaaatcgtgggcgacgccgccggtgagattgccgatcgcttccatcttctgggcctgctgcagggcaagctccgtgtttcgcaacgcgatcgccgcttcgcgctcttccgtcacgtcgcggccgaccgcgtgaatggacgcgtcatagggaacggcggtccaggaaatggtacgatagctcttatccttagcctggtaacgattttcgaaggagaaggtcgttgcgccctcgctgagcttgccgatttcggcaagcgtcgtcgccatgtcctcgggatggatgaaatcgaggaacgactggtcgatgagctcgccctcctcccagccgaatacggtcttccatgccggattgactgccgtgatcctggcttcgaaatcggcgaccagcatgatgtcggtcgatagccgccacatccggtctcggtcggcggtgcgctcggcgacgcgctgctcgagcgtttcgttcagcgcctcgagtttggcgcgtgtttccctctggtcttcgatgtcggtgttcgtgccgatccaacggaagacacggccgtcctcgtcgcgcgacggcaccgcgcgggcgatatgccatcgataggaaccatcggcgcggcgtaaccgcaggtccgtctcgtaggcctcaccggacgacaaggcggaccgccagcggtcggccatggcggtgaaatcgtcgggatggacgatcttggtccaggcgccaccgtcgagttcgccgggtgcggcaccggcatattcatagacgcgctcgttgaaccagtcgagctgtccgtcgggacgcgccgtccagacatggttggggatcgcctgggcgagcgcgcggaagcgtgcctcgctctccctcagttcgcgctgggccttgcgccgatccgttacgtcctggacgacacccacgaaacgcagcggcttgccgctcgcgtcgcgctcgaattcccccttgcgggcgatgacccgcttctggccgttgtcggcgcgacggatgcgatattcgacgttcaatggtgcggcgcccgccgcccgcgtccgggtgttggaaccgatgtcgcggtcttcctcgacgatcagcccttccagcgtctcgatccggacgtcgccggcatcttcgcatccgtagatcttgcagaattccggcgtggcgttgagaacgttggtttcgagatcgagcgagaagacgccgacaccgcccgcttcctgcgcccggcgcagccgcgcttcggcgtcgctcagcgcctgcgccgtcaggtgttcttccgtgcggtcgcgcagaaccttgaccaggccgaccggcgttccatccttgtcgcggatggggcggatctcgccattggcccagaaacgttcgccggatttgcgaagatgccaccggtcgtggtgggcgttgccctgcctcagcgccgctgccatcgcctcgctcgccttgtcggcctcgcgatcctcaggcgtgaaaagcagttgccaatgcttgccagcgacctcttcttcggtccagccgaagatgcggcgagcgccttcgttccagcgcaagatgatcccatccagatcgagagcaagaatggcgtaatcgatggcgccgtccatgatctgacgactctggcgctcggatacccgcagcccctcctcggccgcgacgcggtcggtgacatcggaaccctggacgaagacgccgacgaccctgccgtcgggttccgtcatcggctggtagaccagatcgacatattttcgttcgaccggatcgtcgggtgttgcctgcagatcgaccggcagcgcccgtccctcataggcgacgcccgagctatagacctgatcgagaagttcgtaatagccctgcccgcgaagctccggaagcgcatcgcgcaccgacatgccgacgacatcgcggtcgccgaccagctggcgataggcggcgttggtcagttcgaagacgtgatcggggccatgcatcatggcaacgaagccgggcgtctgctcgaacatgcgccgcagccgctcctgctcgccattgcgccagcgctccgccgccaccttggcggtcgtctcgaccacgatcgcgattaccccgcaagggcggccgtcctcgtccatgactggtgaatagtcgaggttcatgaagacctgttcggctttgcccgtccggaacagagtcagctcctggtcctgataggcgagcgtcttgcccgccagcccgaccttcatgacattgtcgttgaaatcggcgacctcgggccagccttcgcgaaccttcgaccccagaagctgcggatgccgcccgcccgcgaagatcgaataagcgtcattgtagatcatgacgccgtcttcgccccagagtgtcacgatcggcaccggcgactgcaaaatggtcgatgccgtgaccttcacggcgttcggccaaagcgaaggagggccgagagaagtcttctcccagtcgaagccacggataagccgggcgagctcgccgtcatgggcgagaaaatcgaattcatcaggtgtcatggacttcgcccggttgttcccgccagttatgtagcggaaacatcgacttggggaagtggggccgagcggaacccagcgctttatattagcggtcgaacgcggcgacaggagaaaacgatcacctcactggtttcggcgcttgccttccaagaggtcgagcaccgaattggcggcatccatgacattcgtcccgggcccgaacacagccgcgacgccgtgctccgtgaggaaggcgtaatcctgccgcggaatgaccccgccgaccacgacgatgacgtgctcggcacccttcgccttcagcgcatcgatcagctgcggcgccagcgtcttgtggccggcggccaatgacgacatgccgaccacgtgcaccttgctcgatatcgcgagggcggctgcctcctcgggcgtctggaacagcggacccgccagcacatcgaagccgatgtcgccgaaagccgaggcgatgactttggcgccgcgatcatgtccatcctgcccaagcttggcgaccatgattttcggcgccccgcccagcgcttcggagatggccgtcatccgcgtgcgcagctgccgcagttccggctcatcgctataggcatcgccatagacgtgtctgacgacctcgggctcggccgtgtgatcgccgaagacgccgcgcatcgcatccgagatttcgccaacgctggcgcgcgcgcgcgccgcttccaccgccgcctcgagcagattgcccttcccgctccgcgccacctcgcgcaacccgtccagcgtttccgccaccttggccgggtcgcggcggcgcctggtgtcctcgagccgcttgatctgcgaggcccgcacggcggtgttgtcgatatcgaggatgtcgatcggctcctcgttttccagccggtacttgttgacgccgacgatgatctcctcgcccttgtcgaccgccgcctgccggcgcgtggccgcctcctcgatcaaccgcttcggcagtccctcgttgacggccttcgtcatcccccccagcgcctcgacctcttcgatcagcgcccaggccttttcggcaagctcgttcgtcaggctctcgacatagtaggagccggccagcggatcgaccaccttggtcacgcccgtctcgtgttgcaggatgagctgggtgttgcgggcgatgcgcgacgagaattcggtgggaagcgcgatcgcctcgtcgaacgaattggtgtgcagcgactgcgtgccgccgagcacggccgacatcgcctcgaaggcggtgcggatgatgttgttataggggtcctgctcctgcagcgagacgccggacgtctggcagtgtgtgcgcagcataagcgacgacgccttcttcggcgcgaactcctccatgatccgcgtccagagcagccgcgcggcgcgcagcttggcggcttccatgaagaagttcatgccgatcgcgaagaagaaggacaggcggccggcgaactcgtcgacatcgagccccttgtcgatcgccgcccgcacatattcgcgtccgtcggccaacgtgaaggcgagctcctgcaccagcgtcgcaccggcctcctgcatgtgatagccggaaatcgagatcgaattgaagcgcggcatctccctggacgtgaactcgatgatgtcggccacgatccgcatcgagggttcgggcggatagatgtaggtgttgcggaccatgaactccttgaggatgtcgttctggatggttcccgaaagcgcggcgcgcgatacgccctgctcttcgccggcgacgatgaaattcgcaaggatcggaatgaccgcgccattcatcgtcatcgacaccgagaccttgtccagcggaatgccgtcgaacaggatcttcatgtcctcgacgctgtcgatcgccacgcccgccttgccgacatcgccttcgacgcgcgggtggtcactgtcgtagccgcgatgggtggcgagatcgaaggcgacggagacgccctgctgacctgatgccagtgccttgcgataaaacgcgttcgatgcctcggcggtcgagaagccggcatattgccggatcgtccagggccgacccgcatacatggtggcgcggggaccacgcgtgaacggcgcgaacccgggcagtgagcccggttgcgaaacagcgtccagatcgctttcggtgtagagcggcttgacgtctatcccctcgggcgttttccacacgagcgtgtcgggcgaagctcgaagctccttttcggccagcgcccgccagtcccccatcgtcttctccccaggcgtcctcttcgtcatctcaaagctccgcattcttcttttagcataggctagcattttatccgtgccggatgcgagggcggcgcgcgagaataagatggcggctcgcattgatggggatttcagggccagacgattgtcaaatcaccctgatatcgctatgttggcttccatgatgagggcgcgaaaggcgcggtttttagagaaaattcatcatactcaaagcgttgttttcaagatggaaacaccacgttattgaagctaaatcagccttttctttcctgactcatatcgccggtttccagccccccgttcggggtcgttatcgatagtgatggatgtcgagtcgcaaagtcgatatggtggcgatatctccccgccgaacgatcgacacgaaatgccgaaatctcccccgatagcctcgaatacgctcgacgaagcggtcctgcgccgcgcggagacgctagacgcactggacagtatctttccgttcgaacgccgcgaccggctggcgcaactgctgacggacgaggacgcggaaacgctgaggcggttgatcgagggcggcgcgccggagaatagcatccgggcactcgccgccgacctcggctatctccaggcctggagcctcgccaacaccggcggccccctgccctggccggcgccggaggctctggttcaactcttcatgtcccagcacctgacgagcgcgacctcggcatcaaccgagggagacggcggcatgccccaaccggtcgaacaggagctgcgccgccaagcgattctgaaaggcgccctcccccacgcgccatcgacagtgcgccgacggatcgccagctgggcgacgttgacgcgcgcacgcgatctcagcggaccgtttgccggcgcgtcgatcaagcaggcattcaagcgggccgaacatgccagccggcgctcgccgacgagaatgagcgcgaccgacgtcaccgacgacatcctcgcccggcttctgtcgacctgcaggcgagacggcttggtcggctgccgcgatcgggcgatcctgcttctattggcggcatcaggcggacggcgacgcgcggaggtcgccagtctgcgtttcgacgatgtggcgattgacggtcgaaaggaccgtcccgggaagcgcaggcgcgcggttcatctgacggtggagatcagtcggccgggaagcagcgaacagctgagcctcaccggcgataccgccacggcgcttctgaggtggatcgcggaagccgggatcagcggcggtccggttttccgcaagatcgatcagtggggcaatgtctcgcggcgaacgctgacgccgcagtcggtcaacttgatcgtgaaggcgagggcgaagaaggcgggcctcgatccgacgctcgtctccgcgcaggggctgcgatcgggctcgtcggcgcggacgcgcgacaaggctgcggctgattgagagcaggcgccggcggacggacggcgagcgtggtggccgcagagagatcgcggccgtgaccgcggtcgagcggcgcacgccttggccttgcgtcgacacctctcgaccgcctcttgaaattcgcggaccgccgcatcatctatcgtccactgcccgtatcgatagcctgcaacgcctgctttgaagcggcatgctttcgctgtccgggaatgaaagggcgctcctcgatcgagttgagcgccctttctgtttttcggcgcacctccccgaaccgccggccgatctccgccggcgcggcacgcccgatcccgcaaatccaaatcagctgttcgcagtcgacgaccgggcaagacgcgcatgccgacccgtgctatcatcccaagtgcagggcgttgtcccaagcctttggcacctcgttttcaaatcgccggccaggcatggagcgccgtctccagcatcgccttgtcgagaggccaagataggaatgttccccgcggggaacagctacacgccggtgggccaagggtggccaaatccgtgttccccgcggggaactggccaatttgcagccaaatgcgaatcgcgctacttcttcaactacgcaaaaagggcgaattatcgttttttcgcgaaacaacaggcgggttaactcaccattaaccatctcggcgcttaggttattgaaaccgaattgagggtagaatcgtgaaccggcacttgagcagcctcgacttcatgcagagcttttccagcaaactggaactggccctgcaaaacctatcgatggcacaatatccaccggacgcccgccgagagatgcggaagttcacgtcgtctgaagtcgcatcgcttctcgatgtctccgaagcctatatccgccagatcgtcgtgaaggaaaaaggccccgcgccggagacgacgtccaatggccgccgcatgtactcgctggaacagatcctcgaactgcgcatgacgctggccgagaagggccgcaagaagtggatgaacccgcgccgtgttgaaggcgaagcctgccaggttctcgccgtcaccaatttcaagggcggctcgagcaagacctcgaccacgatccatctcggccattatcttgctctcaagggctaccgcgtcctcgccgtcgatctcgacccccaggcatcgctgaccagccttcacggcaacctgcctgatttcaatccgcgcgaagacgaaacgctctatgccgcgatccgcttcgaggatccgaagccgacgcgctcgcttgttcaccagacccacatcgccggcttcgacgtcatctgcgccggtctcgatctcaccgagttcgaaaccgcggtcgctctcgaaatgcgcaagagcgggggcaccagcttcctgctgcgagtttcgcaggcgctcgagcaggtcgccgacgactatgacgtgatcctgatggattcggcaccgtcgctgaactttctgacgctgtcgtcgctcaccgccgcgaccgccgtcatcattccggtgccggcgcatatgctggatgtcgattccaccggcaagtttctggagctcgcatcctcctacatgcagatcctgagcgacatgggcgcttcggcgcagtgggatttcgcgaagttcctcgtcaccaagttcgaagccaacgatcacccgcaggccaacatgaccgcgctgatgcgtcaggtcttcggcgatgatctgttgttgaacatggtgaccaaatccacggccgttgccgatgcgctgacctggaagcaaagcctgtacgaagtgcagcgctccaggttctccgcgccgaagacctacgaccgtgccatggaatcgatcaacgcctcgaatgccgagatcgaaaaactactctggaatgcatgggggcgtgaatgagccgcaaagactctcggggtatgttcgccaatgtgctcggtcagctcgaccagccatcggcgacaccgccgcaggccaagacgacatcgccgcatctcttgaaggtggccgccggcgttcggcagattcaggagaagggcgaggttctcgatcgtctgctgaaggacggcgatcatataatcgacgtcgatgccgatgacgtagcgccctcgaccattcccgatcgcttcgacggtgcctatgatgacagcgccatagaagatatcgccgcatcgatcagcgagcgcggccagatcgtgccgggcctgatccgtcccttcaagaatggccccaagccttaccagatcgtcttcggtcgccgccgtttggcagccgccaagaagctcggcctgaagttccgcgccatcgttcgtgagctcacggatgaagaagcgatcgtcttccagggcgaagagaacgccaaccgcaacgatctgtccttcatcgagaagtgcgccttcgctttgtcgcaggagcaggccggatacaagcgcgacatcatttcggcgtcgctggcaaccggcaagtcgcatatctccgagatgctgcgcatcgcatccgccgttccgcgtgccacaatgcttgtcatcgggtctgcgccggatatcggtcgtcgtcgctggatcgagttcgtcgataccttcctggcgcgtcccgatgccgccgaatgcgtggaagaggctctctcggaggtcaagcgcagttcggagaccgatcgcttcgctctggcacttgcggccctgaagaccgctgccgccaagcccgccgctatcgagacgccgcagactgccgagatccgtgccaacggctttctcctggcaaccgtcagctacccgaaatcaggtccgcgcatcagcttcaccaaggcggtgccgaccagtttcgtcgattttctgaatgatcgcatggagacgcttcacggcgaattcctgcagtccgtagacaacaagaacaaaggataacgccgcaaaagaaaaaagcccccggacgttgccgtcgcggaagctcttctcattggtttagcagctagagaatcgcatttcctcgaatcactgtcaagcatctttggcaccgttttggtggacgaaattcttttgccttgaaaaaggtgaaggtgatggaaggccaatttgtaacgacgccctttgggcggcgagcgatgtcgcttggcatgctcgcaaatcaggtcagagcccagcagatcaagccgggatattcgatcgataaatggaagctctaccgttccctgtgcgaggccaagcccttgctcggtgtcacggaccgtgcgctcgctgtcttgaacgcgcttctgagcttctatccgcagaacgagctttccgaagaaagcgggctggtggtgtttccttccaacgcccagctgtctctgcgctgtcacggcatggccgaacagacgatccggcgtcatctggcagcgcttatcgatgcaggtcttttgacccgcaaggacagcccgaacggaaagcgctatgcgcgcaaggaccgctccggctccattcgcgacgcgttcggcttttcgcttgcacctctgcttgcgcgcgccgaggagatcgagcacctggcggcaaaggtggttgctgagaaattgtacgtccagcatctgcgcgagcagatcagcctgtttcgccgggatatagccaagctgatcgaagccgcgatcgccgaccaggttccgggcgaatgggccgagactttcaacgagtttcgcgacattgtcgaaagcgttccgcgcactccaactaccaccgagctggaagttgtttgcgatctgatcgaacgtttgcgcctgaaagtgcttaaccatctggatctacaactaaaattgcgaaatttgagcgccaatccctatcaaaatgagcgccacatacagaattccaattccgaatctattcttgattctgaagcgcctgcccaaatcgcgaacgagcaacacgcgagtggacataacgtcgagcaagatcgagaggatgcggacaatgcgtctcctcgcagatctgtctcggtatccattccgtctttgcctggacctaacatggtcggctccgatgacagagctgcgacggtcgaatcaaaggctggggataaccgggggtcggaactgaaatccttcccgcttggtctcgtgctacaggcttgccccgatatcgcggcctatgggcccggtggcggcatcagaagctggcgagacctcatcagcgccgcgtccgtcgtcaaatcgatgctgggggtgacaccctcggcctatcacgacgcctgcacgatcatgggctacgacaacgccgcgaccgtcatcgcctgcatcctccagcgcgctaccaagatcaactccgcgggcggttatctgagggatctgacacggcgcacggagaagggtgagttcgcgatcgggccaatgctcatgtcgctcgtcaggagcaatggagggcctgtcacgctgcaaagctgagagcaatgtcgtcctcggtggcacttaccccgtcgaatgatcgtagagaacgttgccggtcgcgccatcgacgccggagaggctgacctcgtatccccagagatgacggatatgggtgagggtctcgttgcggctggtctcttcgagaagaagaccatcattgaccgtgtgcttcagccgaagcctgcggtcgccgaggagatcgacgtcgacgacctggatatcgggctgcctggcgctgacatcgtagctgcgtgcgagtgccgagcggatttccgcgtagccgcgctcgttgtggatcgaggagacctcgcagaacttgtcggccgccatgtcggacagtctgaagagccggaatttgcggatcacggccgggctcagatattgcaggatgaaggattcatcgcgatggttcgcccatgcgtcgcgcagcgtgcccatcggatctctgttgccggccatggatggaaaccagtcccggtcctcgtccgtcggattggtgcagatgcgctcgatatcctgcatcatcgcgaagccgagcgcataagggttgatgcccgagaaacgggggtcgtcgaaaccaggctggaagacgacgttggagtggctgctcaagagctccagcatgttgccttcgctgatcttgccctgatcgaacagccgattgatgatcgtgtagtgaacgtaggtggcgcacccctcgttcatcaccttggtctgacgctgcgggtagaagtattgggcgatgatgcgcacgatcctgaggatttcgcgctgccatggctcaaggatcagactgtgcttttcgatgaagtagagaaggttctcctccggcaggttgagcgccttcttgcgttcggaggcattgcgctccgcctcgtggggatcacggctgtcggcggaggagggcagggtgcgccagaggtcgctataggtctgctcctcgtattccaatcgttcacgcgctctttcacgcaccttttcggaggagaggcggggagggcggcggtagcggaagacaccattgtccatcagcgcatgggctgaatcgaggattgcttctaccgcctccgtgccgtgccgctcctcgcacttggcgatgtatttcttggcgaagtccatatagccgaggatggcgccggcatccgtccactggcggaacaggtagttgttcttgaagaaatggttgtgcccgaaggaggcgtgcgcgatgaccagcgtctgcatggccatcgtgttttcctccatcagataggcgatgcaggggttggagttgatgacgatctcgtatgccagtccccggtggcccttgcgatagagactgtcctcgtagatgaaccgcttgccgaaggaccagtgctggtacatcaatggcatgccgaccgaggaataggcatcgagcatctgttccgacgagatgatctccaactggttcggatagatatcgaggcccatctcgccgatcgcgatatcctggatggcgtcgtggacgatcgacagggtcgcgaaattccagtcggagccttcaaacaagagctgggaactctccgctcgtttcgccatatccttattccctcagttacgcgtacgcgcgccggcttgccgggtgaagagcttgcgaaagactggatagatgttgcccggtcttgcgatgcgggccatgtgaaagttggggacctcgccctcgacggttcggtaggcgcgccacagcgaggtgccgttgtcggtggcgccgaatatttccgtctcgcgctcgtcgatgatctcgacataggcgtaatactggcaaagccgcatcaggtcgccgcgcaggagcgccgcgcatcgctcggaatcgccgctgctgttgtcaccgtccgaggcttgcgccgcgtagatgttccacatgtcggacggatagcgcgcctcgatgatccgctgcatctcctcaagcgctgtcgagaccaccgtgccgccgctttgcttgctgtagaagaatgtctcctcgtcgacctcatgcgcctcgtccgtgtgccggatgaaaatgatgtcgatccggccgtagcggcgcttgaggaagaggtgcagaagcacgaagaagcgcttggcgagatccttctcgcgctcgcccatcgatgccgatacgtccatcaggcagaacattacggcgttggcgttcggcaccggctgccgctcgaagcggttgaagcggacgtcgacgggatcgacataggaaatccgtcggcgccgccgctccagcgttgtaagctcgtcgcgcagggccgtcagtttgcggcgggtttccgccgataatggggtctcggcctcgagtgccgcgatctcgtcggtgatgagcttcacctgccgctcgctcggccgctgcaaggccatgcgccggccgaagctgttgcgcatggtgcggccgatattgatgttggtgggggagcccgaagtggtgaagccgacgcgctgcggcttgaatgtcaccgtttccttcaggctcagcttgaccagatcgggcagttcaaggtcctcgaaaaagagatcgagcacctcctcgcgcgacaggatgaactgaaaatcgtcatcgcttccgccgccgcccgcaccatgcccgccaccgccgcccgcgccgccatccggcttcgagatccggtcgcccgctgaaaactccttgtttcccggcagaacatgttcccgattgcccgatgtgggcgaggaacggaaggtcggctcaccggcaccacgcgccggcatggggacgccatgggcggcatcgacatccgttatcttgtcggattttatctgatccttgatcgcccgcttcagctcgtcgcgggcgcgcttcaggaatcgttgccggttgccgaggctcttgtccttcgggttaagccggcgatcgatgaaattcggcatgcgccaatccctcgctttggctccggttttggcatcgtcaaccggccttgttcacccgcatgtaccaatcgaccagtcggcggacctggcgtgccgtatagccacgctcgatcatccgctgaacgaattcgtcatgctgtttctcggtcgagctgtccttcttggagccgaagctgatgacgggcagcagatcctcaacctgaccgaacatccgcttttcgatcacctcgcgcagtttctcgtagctcgtccatgccggattgcggccgccattgcgcgcccttgcccgcaacgtgaacttcaccacctcgttgcggaaatccttggggttggcgatgccggcgggcttttcgatctgcgacagctcgctgtcgaggatttcccggttcaggatctgcccggtatcggcatccttgaaatcctggtcctccaaccaggcatccgcgtaggatatgtagcggtcgaagaggttctggccatattcgctgtaggattcgagataggccttctggatctcgtggccgatgaactcggcatagcgggtggcaatctccgacttgatgaagtcgaggtaactggcctccatttccttcggaaactgctcgcgcttgatcgcctgctcgaggatgtacatcagatgcaccggatcggcggcgacctccttggtgtcgtagttgaaggtctccgacagcaccttgaaggcaaagcgggtgctgatgccgtgcatgccttcgtcgacgccggcaacgtcgcggtattcctgcacggacttggccttgggatcggtgtccttcaggttctcgccgtcatagacgcgcatcttggtatagagcggcgaattctcatggcggatgaggcgggtcgccaccgtgaagcggctcagattctccagcacttcaggcgcgcaggcgctctttgcgagttcgctttcgcgcagcagcttctcgtagatctgccgttcctccgtcacgcgcaggcaatagggcaccttgacgacaaggatgcggtcgaggaacgcctcgttgttgcggttgttcttgaactgctgccactcggattcgttggagtgggcgacgacgatgccctgataggggaaggcgccgaagctttcggtgccgttgtagcttccctcctgcgtcgccgtcagcagcgggtggagcaccttgatcggcgccttgaacatttcgacgaattcgagcaacccctgcgtcgtgcggttgaggccgccgctgtaggaataggcgtcggggtcggcctggctgtagttttcgagctggcggatatcgaccttgccgaccagcgccgagacgtcctggttgttctcgtcacctggttcggtcttggcgatagcgatctggcgcagcctggatggcatcagcttgacgacgctgaagcgcgagatgtcgccgccgatctcgtcgagccgcttggtggcccagggggaaataagcccggtgaggcggcgcctggcaatgccgtatttgtcttccagaagatcggacatccgctccggctggaagaggcccagcggtgattcgaaaaccgggctcacctgtccgtcgatcgccagcgtgtaaatcggaaaacgctccatcagcttcttcaggcgttcggcgagagacgacttgccgccgccgacgggcccgaggagatagagtatctgcttgcgctcttcgagaccttgcgcggcatatctgaaatagccgacgatcctttcgatcgtgtcttccattccatagaaatcggcgaaggcgggataaatcttgacggtgcggttggagaagatgcggcctaatcgctcatcggcgctggtgtcgatcagtttaggttcgccaatggcttccaccatgcgttcctgcgcggtggcgtatagtcgtttgtcatcgcggcaggccaggagatattcctggagacttagctcttcttgcgcggcgttcgtatagatctccgaaaacagatcgaatacgtcgctttcgctcttctgcatctttgctctcccgcggccggttgaatgaggacgggatcgctacgtgtcggctcgcgagatagaacgcgtcagactattttattacaatgcgcttacgaagttcgggacagtctgtagccgatagccgcgatactcgtcagactcacattatgcagccgccgcgtcatatcgccaagggcgcagataggatttcactcttttttgcacggtatgtgacaaatctcgcctatgcacaaaaaaagggccgccgagcgaccctttttcgttgctttgcgctgacgttcagttcggcagagcgtaggcgatgacgtagtcgccacgaagatccgactggcgtgcgccgccggccgagatgatgacatactgcttgcctgtcttcggcgacttgtaggtcatcgggccgccctggctgcccacgggcagacgggctttccagacttccttgccggtcgccgtgctgaaggcgcgcagatagaagtcctgcgtgccggcgatgaagatcaggcctccctgggtcgcgagcgtgccgccgagcgtcggcatgccgatcgggatcggcaggcccatcttgatgccgagcgggccggtgtcttcgacggtgccgacaggaacctgccaggcgatcttctgtgtcttcatgtcgatcgccgtcaggctgccgaacggcggtgcctggcatgggatgccgagcgccgacaggaagcggttcttgttgaccgcatagggagtgcccttcatcggaacgacacccatgccggcattgacggattcgccgccgctgttgacggcgttggtcggggcggcttcctgcatctgtatccagaggccgaggcgcatgtcgttgacgaagatgtagttcgagttcggatcggtcgaaaggccgccccagttcatgccgccaagcgagcccgggaagttgagcgcgaggtcggtgcccggaaccgtgaagacgccatcgtagcgcattcccttgaaggcgatgcggcacaagagctggtcgaacggcgtcgcgccccacatgtcgctttcggtcaacgtcttggcgccgatctgcggcatgccgacggagagcctctgggtcggtgcgtagggttcgttcgggatgttgccgggcttgaccgggacatcgtcgaccttggtcagcggctcgcctgtcgcgcgatccagcacatacagctggcctgccttggtgccgaagacgagcgccggaacggtcgtgccgtccgccttcgggaagtcgatgaacgatggctgcatcggtacgtcgaagtcccacagatcgttgtgaacggtctgatagacccacttttcgcggccggtggtggcgtccagcgccagcatcgatgcgccgtacttgtggtctagatccgtgcgcgtcgcgccgtagagatcgaccgacgagctgccgaccggcatgaagacggtgtttgaaacaggatcgtaggacatcgatgcccagacgttcggagtcgaacgcgtgtagctttcgcccgcaggcggcagcagcgtgatattggggttgcctgggtcgaacgcccaacgcagctggccggtcacgacatcgaagccgcgcatgacgccgccgggcatgtcggtgctgacgttatcggcaacgcggccgccgacgacgacggtggtgccggcaagcgtcggcgccgaggtcaggacgtagctcggatcgggggcctcgcccatgccgatcttgagatcgacgcggccgttcgtgccgaagtcagggcaaaacgcaccggtgtcggcatcgagcgcgatcagctcggcggtgatcgtgttcatcagaatacggcgttcgcaaagcgtgcccggtgcgacggcgacggcggtgaccggcgtggagctcggcgccgacggctgctcgatggcgcgcgtcgcgtcgaagtaagcgaggccgcggcaccgcatccagaccgacgacttggcgttgatctcggtcttccagatttccttgccgctatccgcgtcgattgcgatgacgttgttgtgcggcgtgcacacgaacacgcgatcgccgacctgcagcggggtttcctgatcttccgcgccattggcgccggggctgatcggggtgtcgccggtgcggtattcccacgtcaccttcagatcgccgatattgtcgacgttgatctggtcgagcgccgcgaagcggctaccgcccgaagtgttgccgtagtgttcccagttcttctgctcgcgggcgggatcgaccggcgtgcgggccgggccggcgccgcttgcgaccactggcgggtgtggaatgaacatgccgtagaaggcagcgccggtgccgatcgccagcacgacggcaagcccgaaggagacaccgtaggcgggcgtgcggccagccgaacgacgcaggagcgggaaggagagggccacgacgatggagccgacggcaatcgccagcaggcgcgagatcagcggccagaactcgaagccggcgtcccagatggcccagacaaccgagagcacgaagacgagcccgaagagcagggcgcccagcggcttgcgccgcgcgatgagcaggcccgcgatgacgagcccgatgccggcgagcaggaagtaccagctgccgcccagcgagacgagcttgccgccgccgattgcgaaaaacagcccggcgagcgtgatgatcgctccgagcaatatcagccacagacggcccaggagggccggcgggttcgatgattcatccattgaatagcctcactgcatatccggcaaacgaaaatggagagcctgcaaatacgggatgctcgccgtgtccgttcgccgcttggtttgctgtcctaacgacagctggcgaaagctcgcgtttccgggaacaccgacaaggacaagcaagaaactggggaaaatagcgccatatgcgccagttcaggggatctgataaagtccatcaggctcgtcctacgtggttcgtaaatgcacgtgtcaggcaccgacagagggagacagcatcttaacgtctccaaccctgagctgggatatatcgccagctaacggatcgttgcaagttctattttagacaaatggataatgcgcgccgaccattggcatcgccgacatctcgcggtggcgatgccggttcggcttgccgtgcttcgcgttccgtcagaacgggtttgtcgtggcgctttcgaccttggccggcctcttgtccgacagtcgctcgatgcaggccgcataggtcgcatgcatcgggtagatgcgcgatgtcggaatgacccagtcgggttcgttgccctggaacgagacgttgatgtccgccattccactcagcgcggcgcgaatgatcgcctgcacgccgccggcgttcttgtttccgggcaagctccagacgcgcaggcttttgctgtcggcgccgatggcgggcacatccatggtgttgcttttgcccgtgaccgagacctgtgtggagagcttgtctggcagcgtccacgcgtcattcttgatgatccaggatgcgtccttgaggctttcccggaattcgacggtctttcccgtcatgctgtcccagaccagcgcgcagtagggctcgccgccgttgttgacgtagccgatcgaccactggcgggacgatccgatccactcctcggtgccgttggcaaccagcggcgcgccggcgctgaaaagagcggcggcaagaacaactcttgcagaaagaacggcgaacggtctcatttttccgtacctcggcgcaacgcggcatagcgctcggggagcgccccttgatccgttcttgtcgcacgaacaggtttcaaaccggtgaatcgccagacgtgcagcgggcaactccgcgacacgccagggtgtcacggaaggacacacagcatctcgtagagcagattggccgcgatcagcgccgtgttgcccgacgggtcgaacggcggcgacacctccaccagatcaccgccgacgaggttcagtccggcgcaaccgcggatgatttcgagcgcctgccatgtcgtgagaccaccgatctcgaccgttcccgtgcccggcgcgaacgccggatcgaggctgtcgatgtcgtaggtcagatagacgggcgtcgagccgatcttcgtcctgatctcttccatcaagggcttcagcgatttgccccagcaggcctcggcctgaacgacagtccagcccttgtcgcgcgcccaatcgaaatcctccggcgaatagccggtgccgcgaaggccgatctgaaacaccttgtcgttgacgagaagcccgtcgtcataggcgcggcggaacggcgtgccgtgggcgatcttctcgccgaacatctcgtcgttggtgtcggcatgggcatcgacgtggatcagcgccaccgggccgtgctttttcgcgatcgcgcgcaggatcggataggtgagcgtatggtcgcccccaagcgtcagcggaatgcagggatgagtgaggagatcgtcgtagaaggcggtgatgatgtcgaccgaccgcttcaggtcgaaagtgtcgatcggcacgtcgccgatatcggccacctgcatccgcgcgaagggggccgcgcccgttgccatgttatagggacgcagcatgcaggattcctgccggatctgtcgaggtccaaggcgggtgcccggccggttggaggtgccgacatcgagcggaattccgacgaagcatgcgtccagaccctccgccgtggcctggctcggcagccgcatcatcgtcgatggtccggcgaagcggggcatgtcgttgccgccgagcggctggttgaacctgtgatccggcatggcttcatctttcctgatcgcgatggatatgtgtcgggtgctgtctgggcgctacggcgttgcctgaaggacggcgaggacctcgcgcgcggcacgctcgccgctttgcagcgcgccgtgggcggtcgagaagtcggtcgtatgggtcgcttcgccggcgaagaacacacgctggtccagagacccggcgagcgtgagacgggcgtcggaatggcccggcagagcgtggctgtaggcgccgccgatcgagactgttctgctccagtccgacgcgacgagcgggcggagattgcgtcttatattgctgccgaacagacggacgagctgatccgtcgcacgcgcgaatgcctcgtcttggcctctttccgccacggcgcgcgccccggcgccgccgaggtagcattcgatgacgggctgaccgaaggggcggatatagtagctgccggtcgatgcatcgcgcgggtcgccgataagatgcgtctcgtcctcgaagggcgccgggccggtgatctcgagaaacagcttctcgttcgcgccaagcggcaagcgcatcgccgcggctcgccacgcatcgaatgccgatggccagcgaatggtgtccccggccaggatattggtggagacggtgacgatgagtgcgcgggcacgcacggtgcccgcagatgtcttgacctcgatgcgatgtccgtcgagcccgatggcttcgacgggcgtcgagagcttcaccatcgcctcagcgggcatggcggcgccgacgagcgcgccatagcctgtctggacgcgccagttgatcaatgtcgatgcttcgttgtaggcggcgtagtccttgcaggaaatacgctcgagttcgtcgccgctgatatacccgctgagcgcctgcagatagcttgtccagccatcggccgggtccagcgcatcggcggcgacatccgacgggggaggggtcgtcgagacgcgctccgtccaccgttcgaaggcgagatgggcggcgtcgcgttcatgcggcgcaaagccgagatcgcgaaactgcccgccccaggcggatggctggcgatcgacggtgatgccgatctcgccggcgatgcgggtccaggggtttcgatcgccggagtgaagccagccgcagccgagatcgacgacgtttcccgccaccttggccgtcgaggcgcggccgccggtgcgggaaagagcctcgagcacaagcgtcttcagcccggctttgacgagtgttcgggccgcacccgtgccagccgcgccggcgccgatgaccacgacatcgggttcttccatcatcgacattgcctgggcgactttccttgcggtcaactgaatacgaacgtcttcgccacatgctccataaaatggcttgtcgatcaatgccgtttcgcggctttttgctgaaaattcgagccattgcgggcgcggcgtcgaatgtcgccgcgcccgcgatcagtctcttatcccagataggacatgatcaccgaggcaacctgagccgattcactcgtgtcgggtgcggctgctgccgatgccgagcttggcgtctccgagggtgccgtggtcgtggtcgtcgtcgtcgtctgggaggcgcttacgccagccagcgggccgttggtcagcgcctgtacctgtgccgatgtcatcgcgttgatctgggccggtgtgaaggcttcggcctggctcaccgtcaaggcgccgagtgctcttgtgctcagtcccgaaaccgcgctcgaactcagcgcgatgatatgctcgggcgagaagctggccagatcatcggggccgagggccgccgtctgaacgacattgagggcgccgatctgcgcggtcgacagcattccgatctgcgccgtgctcatggcgacgacctggctgtagctcagcgctgccacctgacccgtggtcaatgccgcgatgtcgcttgatggcagggtcgagaacaccgccgtcgtcaggcccttgatcgaagccggcgtgattgcagcgaactcctcggtcgagagagtctgcaactggtcggtcgtcaacccggcaaggccggtcgaactcagggatgcgatctggtcggtggaaaaggtgctgaactgatcggtgctcagcgcgcggatctggtcgctggtcaggccggatattcccgaacttccgagcgccgcgatctcttccgtcgagagcgacgccacgaaggccgtggacagtcccttcatggcaccggagctgatcgccgcgagctttgcgggcgtgagcgcatccaggctggacgaggtcaggcccttcagcgcatccgagctgagcgccgcgatctgacccgtggacaatttttccatctggtcgatgctcagcgcgcccgcctgagcgctgccgaggccggcaatccccttggcgctcagtgccgcgatctgctcgaccgagagcacggcgatgtcgccggtgctcagagccgcgatctgagcggagcccagggcgccgatctgtcctgtcgacagcatctcgacctggcttgtgctcaaggccgcgatctgggcggtcgagagaccggcaatgccggccgtgctcaaagcgccgatctgctcggccgaaagcgaggcgatcgtcgtcggcgacaatccggagatggccgccgagctgatcgcggcgatttcggcggtggtgaagctgtccagatcatccgttccgagggccgcgatctgcctggagctcagcacgccgatctgcgtgctggtcagtgcctcggcctggtcgacgctgagcgctgcgatctggtccgtgctgaggccggcgacgcccgcggtgctaagcgccgcgatctggcttggcgaaagcgacgccagagcgccggtcgacaggccggaaatggcggacgagctgatcgcagcgatctcggccgtggtaaagccgtcgaggtcgtcggaggtcagaaccccgatctgccgcgaggagagcgcgccgatctgcgtgctggtcagcgcctccatctggtcgctgcgcatggcgacgagctggctggtcgaaaggccggctatgcccgcggtgctcagcgccgctatctgttcgggcgagaacgcggcgatgtcggccgtgttgagcgcggcgatctgcctcgacgtcagcgcaccgacctgagcggtcgtgagagactccacctggctggttcgcagggcgccgatctggtcgctggtcaggccggcaatgccggtggggctgagggcagcgagctggtcgcccgagagcgaggaaatcaccgatgtcgaaatcccagcaaccgcgctggaggtgatcgcggccatgtcggcggtgctgaaactatccagatcgtccgttccgagcgccgcgatctgcttcgagttcagcgcgcccacctggacgcttgtgaacgcctcgacctgacggacgctgagcgcgccgatctgatcgctggtcaggccggctatacccgccgtgccaaaggccgcgatctgatcgaccgagagcgccgcgatacggtcggtggcaagggccgcgacctgcctggagctcagcgcgccgatctgagcggtggtgagcgcctccatctggttggaaccaagggcggcgatctggccactggagagaccggaaattccggccgagctcatggcgacgatctgatccgtcgacagcgccccgatggcggcggtcgaaaggccaaggatcgcgccggagccgatcgccgcgatatcggcggtggagaagcgtgagagatcgtccgtgcccagcgcggcgatctgcctcgagctcagggcccccacctgcaggctggtcagggcctcggtctggtcggtgctcaatgccgcgatctggtcgctgctaagaccggctatgcccgccgtgctcaatgccgcgacctgggcggtcgtcagcgatgcgaggtcgtcggttccaagcgctccgatctgccgtgagctcaacgcggcgatctggctcgtggtcagcgctccgatctggtcgctgctcagcgcgttgatgagatcgacggtcaggcccgcgatgcccgatgtgctgagtgcggcgatctggctcgtcgtcagcgtcgcaagcgctgccgccgacaagccggcgatcgcgccggagttgatcgcggcgatgttcttcgccgacaggatggcgatatcgtcggtgccaagcgccgccgtctgcttcgagctcagcgcgccgatctgcgcggaggtcaacgcctccacctgatcggtccgcagcgccgcgatctgcccggtcgtcattcccgtgatcgccgccgtgttcagcgccgcgatctggctcggcgacaacgcggcgatcgtgctggtcgaaaggccggcgatggcaccggagccgatagccgccatgtccttggtcgagaaggtcgcgatgtcatcggcggtgagggccgcgagctgcgcggagctcaggccgctgacctggctgctggtcagcgcttcggcttgcgcggtggtcagcgcggcaagttgctgggtggtgagcccggcgatggcattcttgctcagcgaggcgatctgcagcgtcgacagggcccggatcgtatccgtcgacattcctcccagcgcgctggatgtgatcgcggcgatatccttggtcgagaaggtcacgacatcatccggcccgaggacggagatctggctggagttcagcgtgcccacctggttgctggtcagggcttcggcctgcgcggtcgaaaggaccgccagctgctgcgagttcaatccggcgatgccggcggccgagagcgcggcgatctgcgcggtcgagagagcggcgacgtcgtccgtccccagcgcgccgatctgcgacgaggtgagcgcggcgacctgcttagtcgacagcgcccggacttgcgcgttgtcgagggccgcgacctggctggtcgaaagaccggaaacgcccgacgcgctcatggcggcaagctgctgcgtggtcagcgccgctatgtcgctggtgctgagccccgccacctgcttggaggtcatcgccgcgatctggctggtgccgagcgcgtgaagctgtgcgctgttcagcgcatcgacctgagcggaggtcaggccggtgatgcccgatggcgtcaggacggcgatctggtccgtggagaaaacgccgacattgtcgccaagcgccgcgatctgcgccgccgtcagtgccttcacctgcgcggtggagagcctggcgatctggtcggtgccgagtgcctcgacctggccgctcgtcaggctggcaagagcgctggtgctcagcagcgcgatctgcgcggtcgtcaggcccgcgaccgcgtccgtgcccaggccaggcaagcccttgttggtgatcgccgcgatgtcggcgttggaaaaggtcgcgatgtcttcggccgacagggcggagaactgcacggaggtcagcgccgccacctgcgcgggcgacagcgtctcgatctgagatgtgctcatcgcgccgatctgcaggctcgtgaggctggcgatcgcgctggtgttgagcgcggcgatctgctcgttcgaaaggccctcgacggcgtcggggctgaggccggagatcgccttgttggtgatcgccgcgatatcggcggtggagaaggtcgcaatgtcatcggcgccgagtgccgccatttgcgcggagctcagcaccttcacctgcccgggcgacaacgcttcgacctgtgccgtaccgagagcaccgatctggtcgctcgtcaggctcgcgatggcgctggtgctcatggccgcgatctgggcggttccaagccctgcgatcacatccgtgctcagccccggcagggccttgttggtgatcgcggccatatcggccgtcgagaaggtcgcgatgtcgctggcatcgagcacgccgagctgcagcgaggtcagcgacatgatttggagcggcgaaagagcctcgacctgcgcggagccgagggcgtcgatctggtcggtgctcaggctggcgatcgacgacgtgctcaaggcggcgatctgagcggtggacagcatcgtgatccggtccgtgcccagcgccgcgatctgcagggtcttcagcacgctgatctgggcggtcgtgaaggcagcgatctgccccgaggacaggttggacaaatcaaggccggggatcgccttgctcgagagcgccgcgatatctgccggcgagaaggttgcgatgccgtcatcgccgatcgccgagagctgcagcgagctcagccacgagacctgtgccggcgtgaacgcctcgacctggctggtgctcagaaccgcgagctgcgtcgtcttcagcgcgctgacctgcgccgtcgtcagcgaggcgatctggccggtggagaaggttgcgatgatatcggtgctgagaccgggtatggccttgctggtgatcgcggcgatatcggcggtcgagaaggtcgccatatgctcggcatcgatcgcggcgagctgaacggaggtcagcgccgcgacctgtgccggtgagagcgcctcgacctgatccgtgctcagggccgcgatctgggcgctggtgagcctcgggatcgcggtcgagttcaaggccgcgatctgcgcggtcgagaaggtcgcgatgatatcggtggtcaggccggtgatggcgcggctggtgatcgctgccatgtcgtcggtggagaaggtcgcgatttgctcggcgtcgaacgcggcgagctgaaccgaactcatggctttcacctgcgtcggcgacagcgcctcggtctggtccgtggtcaaggcggccagttggtcggttccgagcgccgcgatctgggcagtggtcagcgccgcgatctgggcggtggagagcgaatccatgctcagcccggtgaaaccctggttggtgatcgcagcgatatcggccgtcgaaaaggcggcgatatcgtccgcgccgaatgccgcgagctgagacgaactcagcgccttgacctgcgctggcgtcaaggcctcggcctgctccacgctcagcgcgtcgatctggtccgtcgtcaggctggcgatggcggccgtgctcagcgccgcgatcttcgcggtcgaaagcccttccagctgcccggtgctgaagcccgcgatctgcgcgcccaatgcggttatctggctggtcgagaacgacgcgatctggtcggcactcaaggcttcgagctggctgccggtgagatttgcgatcagacttgtggacagtgcggcgatctgggtcgacgacagggcgccgatcgcatccgtgctcaggcccgacatggcgcggctggcgatcgcggcgatggcggcggtcgagaaggcttcgatatcggcggcgtcgagtgctgcgagctgcgcggagccgagcgccttcacctgaagcgatgaaagcgcctggaattgctcgtcgttcagggcctggagctgatcggtcgtcaggctggcgatcgaaccggtgctgagggcggcgatctgagccgaggacagggccgcgacgctgccggggctgaggcccgctatggccctgctggtgatggcggccatatcggcggtggaaaacgttgcgacgccatccgggttgatggccgccagctggtcggagctgagcgccttgacctgctgcggcgtgaacgcttcgacctgctcggggctgagggcctcgatctgcccagtcgtcaggctggccagagcgctcgaggtgagcgaggcgatctgagagggcgaaagcgcctcgatctgcgtggggtcgagcgaggcgagctgtgccgtggtcaaggcgttcgcctgggccgtcgtcatcgctccgacctgttcgggcgacagggcggacaggttcaggccgcgcacggccttggtgttgatcgcggcaatgtcttcgggcgacagcatggcgatatcatcggggccaagcgccgccagttgcgccgaggtcagcgccgctgtctgcgtcggcgaaagcgcttcgacctggtcagtgctcaacacgccgatctggctgctcgtcaacgccgcgacggcgccggtgttcagagcggcgatctgatcggtggacagcgccgcgatggcagccgttccgagaccctggattgccttgttcgagatagcggcgatatcggcggtcgaaaaggtcgcgatgtcgtcggccccgagtgcggcgagctgcgcggtggacagcgccttgatctggttcggtgtcagggcttccgactgctcggtcgtcagagcgctcaattgcgtcgtggtcagtgcggagacctggaccgaggtcaggctttcgatggcgtatttgttgagcgcattgagctggtcgaaggtgaggccgacgatcgaccccttggcgatggcgctgagctgctgggaattgagcgcctcgacatcttccacatccagcgccgcgatctgggaggaggaaagggctttgacctgcgccgtagacagcgaagcgatgtcttcggtcgtccatgcggcgaccgccgccgaagaaagagatctgatctgcgttatcgtcagcgtggaggcaaccgtcgtcatgctcatcaatcccgaatgttcaaatggcgtcaataaaaagccaggccgaaattccgatagcgaacggcaggcggcttccgatccaaggcctgattgaggaatcggttatccagcccgcgcagctaagaaccgcaaactaggttgtgtggcttgtctgaacctgaaattgcaggtggtctccccaaacaggctcgggcccgctgccgcgacgagggttaggcagcgagccttgcccgcagcttgccgtctcgtacgctcgcggttcggggcgctgatggcgacaaggaagacgcgcgaagccggcaatttcacacatgtccaaaattatcacgagactgtcacatgaaggaatcacggctccactacacggcgacgcaaagcgatgggatttgcgcatgccaaagagtggacgaatgaacgtgtacgggacggctctttccgtgccctgcatatttaccgagagcgacgacggcggaacgatccgcggatgcccgcgatttctggcgctcgtggccggaaagcagagcatccggctgctcgacaccatcagcggccgatccacgccgatcgccttgcatcgcgtcggtcgacgcggaaaggcctcgttccgctggctgtgatcgcccggcaagtttggggccgcgaccgatcacgaaaggctgattttcgttattccgacctttcccatgctgcactgcaccctagctgatgtcgtatggaacgccttattctcgactttcaggaagcaaccgactggttgcccgcttggctggtcagcatcggtgtgcttgccgccgccttggccgtgggcttgataatccatcgcctcgctttccgctttttgagccgactggtcgaaacgcgggatctgttctggcggtcgctggtctcacgcggtcgccggccgctgaggctgagcattcttaccttgaccctttcgcttggcgcgaccatcgcgccgctgacggcagcacaggcaggcgtgatccgccacatcctgcttttgggcttcatcgccgtcgtcggctggatcagcaagaccacgctgcatatctggatgaccgtctatcttcgtcgcttcaaactcgacgccgaggacaatctgctcgcccgcacccacgtcacccaatccaggatcggcgagcgtatcgcggccttcatgatcgtcgccatcacgatcgcagccgggctgatgacttttccggccgtgcagcaatacggagtgagcctgctcgcttcggcgggcgttgccggtatcgtgcttggcctcgccttgcagccggtgctgaagaacgtcttcgccggcatccagcttgccatcacgcagccgatccgcatcgacgacgcgctgatcgtcgagggcgagtggggcaatgtggaggagatcacctcgacctatgtcgtggtcaagctctgggattggcgaaggctgatcctgccgctcagctatttcatcgagaaccccttccagaactggacgcgggagagcgcggcgctcatcggaaccgtcatgatctatctcgattactcggtgccggtctcggcgatccgcgagaaggtcgaggagatagccgcttcctccaagctctgggacaagcgggtcgttgccgtgcaggtcaccgatttccgcgagaacgtcatggaaatccgcatcctcgtctcggcgtccaatgcgccgaagaccttcgacctgcgctgcgaaatgcgcgagaagatcatcgatttcgtgcagcgggaatatccggcgagcttgccgcgtgtgagagccgaaggcgcggcgaacttcaacggcgtgatcggtggcgatgcggttagggcctcggcgcaatcctgattgcgggcggcagcgcggcgctgctgttcagagaaagtcggccgtctagccgaggcatatcggccggacgatgcccgatctcaaaaaaaagcagacgtcccaaccattgttcgggcgcgtcgcggactccatatacctttcatccaacggcaaccgcttcgccggtcgcctccccttgttgatctcaaaggtattgccatggccgctctttccatcctcgaacttgttcgcgtgacggaggagacggacgcccgtggcgccctcgacaacgcccgtgatctcgccgcgcatgctgaggagtggggttacaagcgcatctgggtcgcagaacaccacaacatgatcgggatcgcgagtgcggcgacatcggtcgtgctcgcccatctcgcggcgggcacgaagacgatccgcgtcggcgccgggggcatcatgttgcccaaccattctccctatgtcatcgccgaacagttcggcacgctggcgcgcctgtttcccgatcgcatcgatcttggcctcggccgggcgccgggaacggaccagatgacgcttcgcgcgttgcgccgctcgcccgagtccgccgaccagttcccgcaggacgttctcgagctgcaggcgtttctggcgcccgccggtccgaaccagcgtatacaggcggttccggcagccggtaccgaagtgcccctctggattctcggctccagcaacttcggcgccatgctcgcgggcgaactcggccttccctacgccttcgcctcccatttcgcgccggaacttcttcttcaggcgttgcagatctatcggacccgcttcaagccatcagagcagctgtctcggccctacgccatggtcggcgtaaacgtgatcgccgccgaaaccgatgccgaggcgcgccggcttgcgacgacgcagcaaatgtccttcaccaacatgtttcgaggcacacgcgggctgagccagccaccgatcgacgacatcgagacctattggtcgccgattgagaaggcgcaggcacagcagatgctcgcccgatccatcatcggctcacccgagacggttcgcgccggcctggagcggctcgtcgaggagaccggcgccgacgaactgatgatcgtgtccgatgtctatgatcaccgcgcacgcctgcgatcgttcgaaatgatcgcggaggccgggcgggatatcgccggctcggctgccggcgacatttcgcttcagcggaaggcctgaccggcattccatccgaattcagcgcaatcgagacgggttgcgtatcgcatgaagacgacaccactggagacaagcatggccaattcgaatgagtatacgccgcccagaatctggacctgggacaaggagaacggcgggcaattcgccaacatcaatcggccgatcgccggcgcgacgcatgaaaaggaactgcctgtcggacgccatccgctgcagctctattcgctcggcacgccgaatggcgtcaaggtgacgatcatgctcgaggagcttctcgccgccggccacaccggcgcggaatatgatgcctggctgatcaggatcggcgatggcgatcagttcggcagtggcttcgtcgcggccaatccgaactccaagatcccggcgctggtcgaccgcagcggcgctgcgccgatccgcgtcttcgagtccggctcgatcctgacctatctcgccgagaagtttcaggccttcctgccgaccgagcctgccgcgcgtgcggaatgcttctcctggctgttctggcagatgggcagcgcgccctatctcggcggcggcttcggccacttctacgcctacgcgccgaccaagatcgaatacgcgatcaaccgctttgccatggaaaccaagcgccagctcgacgtactggatcgccgccttgccgagagcgagtatctcggcggttccgaatacaccatcgccgacatagccgtctggccctggtatggcggcctggtgaagggctggatctacgaagcggccgagttcctgcaggttcaggactacaagaatatccagcgctgggccgatcagatcggcgagcgcaagcctgtccagcgcgggcgcatggtcaaccgtctctccggcgagccatcgagccagctgtgggagcgtcacgacgccagcgacttcgacaccaagacgcaggacaagatcggcgctgccagctgagtttaaggtcggtcgcacccggatcgtcgtcctggcggtccgggtgtgccccttcctctgtccatcaggaagtcagacaaagcggatcaggcggtggtggcgttcgcctttcgcaaggcgatatattcccacagcgccaccagcagcagcgtgaccgtgctcaccatctgtatcgtgacgttctgctgccacggcagcagaacgatcgtcgcgagaagaatggcgagaccggcgatgtgagacagcggcagcgtgtgcgcggcggtgaacttcagccaggcatttccgatcagaaacagggccagcccgccgagaatggccagtgcggtcttcaggctgctgtgctcttctggacgcgacaggctgaaatcctcgccgactgcggtcaggatgacgcccgcgacgatcggcaggtgtccataggtaaagaggccatgagccacggtttcgggagccgtggtcgattccgccttgtcggcggccttctgctggccgtgatgaaaatagatccaccacatgaagccggtggtcaggaaggcggtgcagaacaccatcaccgacaggctcgactgcatgtactccgcagcggtcctgcccgtcgtgagaatggcctcgccaagacagagaatgacgaagagcgcgcaacgctcggccatgtgctcgcccgagatgtcgagcgtttcgcgcggggacctgcccattccgggaacccagtagcgcgccagcggcgagatatattcgatcagcagcgcgacggcccaaaaggcgacgcgcatctcgatgctagcgaaaccgccgatgatccagaagacgccggatgcgattacccagacggtgatgcgcacgaaggtgagataggaggcccggtttacgctcctgaaagcgtagagcatgaagaccgagcgcaggatttgcatggcgcagtagagcgccgcgaatgccaggccctgatccttgaaagcctcgggcagcgcgatcgccagcaggatgccgccgaacatcagcgcgaagagcagaagtcgcaccgcctccttgttggtatccaggaggttggtgatccaggtcgtgtggacccacagccaccagatcgccaggatcagcaggatcgattcggcgagagtcgtcgaactgaagtcctcgaccagggtgtaggacagctggatcagcgcgaatacaaaaacaagatcgaagaacagctccggaaagctggccttcgtctgcttggcgcttttgccacggatcaggctcaatgcgattaccccgccaatcgagccaggcttttagaaaaccgctagatatttcaaaagcgagatgatgccgatgatgatcacgatgatctgtacgatctgctttgctctggcatcgatcggcagacgcgcaaccaagtatagaacaaggacgatcaccaggaaggttatgagtattccgataagaacagatgctgccatttggatcccactccgttgaaaaatcttttagtcacagagcgttagataaaactctcttttgaaaaggaaaggacgggacgtcgagaaactccattgttgttatcgggcggatcgcgcgcatgttctaggaaccttcggggttgcggcgggttcaagaagaaacggaggacatgaccatgcccgcaaaatcgaaagcgcaacagaaggcagccggcgcggccttgtcggccaagcgcggtgaaacgccgaaaagcaagctcaagggtgcatcgcgcgagatggtggactcgatgacggagaagcagctcgaggaattcgcgtccacgaagaccaagggcaagccagagcacgtctccaaatagcccgcggctcgcgttggcctagactagccgccccagctgcgctcgagcacgctgatccagttggcgtgggtgatgttgatcagcgcttcctcgtcgaagccgccggcgcgaaacgcatcgatcaaaagcggcaggccggtcgcatccttcattgccgccggtatcgtcgttccatcgaagtccgagcccagggcgacatggtcgatgccgatgcgatcggcgatataggcggcgtggcgtaccagcaggtcgagacctgtgtccgggtttctggtgccgtcgtcacgcaggaagagcacgccgaaattgatgccgacaagcccgcccgtgtcgcggatggcgtcgagctgccggtcggtcaggttgcggctgtgcgggctcaactggtgaacattggaatgcgaggcgaccagcggcgcgttcgagagcctggcgatgtcccagaaaccctgctcgttcatgtgcgagagatcgaccatgatcctcaactcgttgcaggcgcgtatcaggtccttgcccgcgtcgctcagcccggggccgatatcgggcgacgacggaaagcggaatggaacgccataggcaaagatattcggccggctccacaccgggcccagcgtgcgcagtccgctctggtgcaaaacgtagagcgcatcgagatcggcggtgatgccctccgcgccctcgatatgcatcacggcggcgaaggcgcccgtttcgatcgaccggcgaatatcggccgccgtgcggcagactttcagcccgccggcgctccgggcctcgatgtcgaagagaatgcgcgccattgccagggtgcggttcagcgagtccggctgcgccggagtcaggaaatcattattggcgtccttcgccatgccgggcgaggggacgtagatcgcgcaaagcccacccgccaggccaccggccctcgccctcggaagatcgatgtgtcccgccgcctctccctcgataaacgccttcgccggctgggcgatgcccgaatggtgcagccggagcagcacgtcgttgtggccgtcgaaaacgggcatgagggcatttgacatggtcgggacagtcctgcgtgggtttgcttgcgcctcttcgtatgccaggtcggtcctcccgcgcaaacgcaaacggcgagccgcgtgtggtccggcccgcgttccggcctatcgccgcatgtggcctattgcctgacgtaggcagccgagagcgggccgagttcggccgatatctgccgccatcttgccggctgggcgcccgtgcgcgagatcatcgcctcgatcagcccagtggagacggcatccttcagtcttcgatcgccgttgcgcatgccgagctcgatcagctcgaatacgcgctgcttatcctcgagcgtcgagaatctttcggcaatcagccatcccatgtcggagtagaacgtatgcatgtcctcgagatcggcggccccgatgtcgtcgattgcgttctccagggtcgaggtcgcagggacatgctgcgccagttcggcggtgatcgctttcgtatccattgtcgtatcctttttcttgtgtgcggtgatcggtcaaccggatagcgggctgccgttcagcccggcctgtgagcgttgtcgttcgccaccggccagatcggtcccgctccgtggccacgcaacagccatgcgaggctgacctccagtgtctcggcgatcgtttccaggtcgccggcggagggggccgcgcggtcgttttcccacgatgcccagatgtccggcgccacgcagaggcttctcgcggcggcttcgatggaaattttcacggcgtcgcgggcgagcgacatgcgcccacccatggtgtcgtcttcggcgtcggtcggttgcaggcggtcgatagacatgcatcgctcctgtgcggtcgaaggtccacgcctcgccaatcctggggcgaggcgcgatagcgcaatcagccttcctcgccgagccagctcttcacctggtcgggatgatcctggatatatttatccaccgccttgtcgtaggacgtttcctgcgcgtcaaacatcgccgcttcgagatcggggatcggcagtttcatgcgcgacaggaaggccgcgaccttgggattgtccgacttgaagtccttgcgggccagaacgttgacctgttcggcttcgccgagcgatttcttcgggtcatcgaggtagcgcagcttgtgcttgccgaacatccagtgcgggctccatgcggtggccacgaaccacttctccccacgcgtcgcgcggtcgacggtcgtcagcatgccggcctcgctcgagacctggagcttgtagccgtcgagcccgtaatccttgagtgccttttccgacagtcgcgtgagaccggctcccggatcgatcccctggatggtgccggacagcttcttctgcacgtcttccttcttcaggtcctcgatcgagccgatctggtcggcgggaatgtaatcagggaccacccagccgagcttggcgccgtcatagaccgtgccgagcatatcgaccttgtccttgacctttgcatagtagtcggcatgtgtctgcggcagccatgccatcatcatcgtgtcgaggtcgccgcgcgcgacaccctggtaaagcggcgcgatgtcggcctgcacgagctcgaccttctggttcagcttcgtctcgatcagcttggcggcaagcttggtgacgaattcggcgtcggaccaggcggcccagccgatcttcaccggcttggcgtcctgcgccatggtcgaggtgaccgcgccgcccaagagcgcggcggcaaggccgagggttgcgagtgttttgaacatgagtgctcctttgtgaaggttcgcatttggcgggccgcggcccgccatgatgagttgctcgagatcaggcggccgccggcttcagcgcttcgctttcgcttttgcggaagaagccctgccagaatgcggcgcggggcttgcccaggctctgggtgatgcggtcgagaatgacggcgaggatcacgacggcgatgccgccctcgaagccgctgccgacgtcaaggcgctggatgcccgtcaagaccgtgttgccgatgccgccggcgccgatcatcgaggcgatcacgaccatcgatagcgacagcatgatcgtctggttgatgcccgccatgatcgagggcagggcattcggtagctggaccttgaacagaagctgcgtcgccgtgcagccgaaggcattgcccgcctcgatgaactcgccgtccacctggcggatgccgagattggtcaggcgaacaaccggtggcatcgagaagatgactgtggcgatcgcgcccggcacggcgccgaggccgaagaacatcgcggccgggatcaggtagacgaaagcaggcatggtctgcatcaggtcgagcaccgggcgcacgaaggcggcgacggaatcgttgcgggccatggcgatgccgagcggcaggccgacaagcatggcgatcagcgtcgaggcgataaccagcgacagcgtttccatcatcgggccccagagctcgatatggttgacgagcagcagcccgagcgcggtgaagaccgcaaaaccgatgccgacgcgccaaagcgagagggccacgaagatcgcgatgccaacaggcatggggatagccagcaggccgtcctggatgcccgaggtcacgaagccgatcgcggcggcgatgaaatcaagcacgggtgagaagttgtcgagcacataattgacggcagcgtcgatgccgtttccgatatcgaagttcatgatttatccgatgtgtttgtgatcagccggcgcggtcgagcgtttcgagcagcgccgatttgctgatggagccgagatagcgcttgccgccgtcgatcacgggaaccggccaggggctggccgcaaccttgccaagaacgttcgacagcggctcgtcggccggaatggcctcgatgtcgggcaggaaggcgccgcgatagggatcggccgtcttcgccctgatcttttcgatcagagacgtctggctgatcatgccgtgataggtcttgtcgcggccgaggatgatcgcgtattcgcgatcgtagttcttcatccgttcgagtgccgccgcggccgaaacgccttcgcgttcgatgatcgtgacctgcgacttgcgtgcgacatcgccggccttgaagacatgcgcgacatcgacattgcggaagaaggagcggacgtagtcgttggccggcttggtgacgatttcgtcgggcgtgccgatctgcacgacattgccgttctgcatgatgcagatgcgatcgccgatccgcatcgcttcgtcgagatcgtggctgacgaagacgatggtgcggctgtgctcggattgcaggcgaacgagttcatcctgcatttcggtgcggatcagcgggtcgagcgccgagaaggcctcgtccatcaggagaatggtgggctcgctggcgagcgcgcgggcaaggccgacgcgctgcttcatgccaccggaaagctgatcaggacggctgtcggcgtagccgtcgaggccgacggccttcagcgcggccaatgccttttcgcgacgttcggcctcactgacgccggcgacctcgagaccgaaggcggcgttgttgagaacggtgcggttgggaagcagcgcgaaggactggaacaccatgctgatatcgcggcggcgaagtgcgatcagttcgctgcgcgacatctccgtgatgtcgcggccatcgatcttgatcgaaccggatgtcggttcgatcaaccgattgagaaggcgcaacagggttgatttgccggagccggacaggcccatgatgacgaagatttcgccggagcgaatatcgaagctggcgtcgttgaccccgatcgagcagcccgttgctgcatggatttcggtttttgacttgccggcgcgcagtagcgccatggcctttttcgggttttcgccgaaaactttgtagatgttgttgagactgatcttggtcgaagccgatggtgtcggcgcgtctgtttcagttgcagcattcatataatcttggcgccgagctcaataggccaggcattctcctttattcgcatacgtccgcgatccgaagcatacctttcggatctggatgtattgtccgttgccttgctgagacaaatcgacgcttcataagtcgaattcgtccgaggaaaatatatattatcgaaaatatctatcctacgtggcgatatgccattcattcaaagttagatactataattttcgatggagcgctgtgctccttatctgtgtatatagggggatatacaaaaactgtccaccttaaaatcaaattttgtgacagatgcgccgctcgccggcagccttgaaacaggccagaacgcctgtcgtaccggggaagcggcgccgcgccggcatcgcaggtatttttgaaatcaaaggctgaaatccgacgctgacgcatccgaaatcgtgtcctttatgaggagatttcgctcgggtgggcgagtgacagcatgccccgatagatacctggatcggagccttcgatcgggatcgcgccgacgctcttgcggtagaaatccatagggccggcgccgccgatcacgccgtaaggatagccctgcgcgtgcatgtcgagcagcgtttcgagcagcagagcatggccgataccctttccgcgggccgcctgatcgacaccggtggggccgaagaaccccttggctgtcgcctcgtggcaggcaaagccgatgagctcccccgcttggatggcgatgaagcaggtggttggctggcgcatggcagcggcggtcgtctcggccgcccagccagcgccgaaacgcggttcgatccacgatgtcagcgccggcagttccggcaccagcacgcggcggatgatgaccccctgcgatgtcatgcggctgtcgagggctgggtcgcgcttcagctcgtagagcttcacaagcatgtccattatcttgatccttgtatctgtcagcctttgacggcgccggcggtaaggcccgccacgatccgccgctggaagacaagcacgacggcgatgagggggagcgtgacggtgatcgaggccgccatgatctgcccgaacggatattcatagcggctggtgcccgcgatcaggccgatcgccaccggtacagtgcggttctcgtccgtcagcgtgaatgtcagcgcgaacaggaactcgttccaggcgaggatgaaagcgagaatgccggtactcgccagcgacggtcccataagcggcaggagcaccttcatcaggatgcggaaatgggagcagccgtcgatgatggcggcctcctccagttcgcgtggaaattccctgatgaaggtggtgagaatccatgtcgtgaagggcaccgtcgacaggagataggtgaggatcagcgcgctcgggcgattgaagagccccagccagttgatcagctcgaacatgcccgagagcacgaccacctgcgggaagatcgagatcatcaggacgatcatgaggatcgcgcggcgctgcggaaattcgatgcggccgagcgcgtaggcagccgaaagcccgatgatcagcgacaggaaggtcgtcgagaccgcgacataggccgagttgagcagcgatcccatgaagaccgggttgtcgatcagctgcctgtaataggtgaaatccagcgccggcatcagcgccgagcgatagagcgcggcaccctgcttcgtcgaggagacgaaggcccagtagtatgggaacagcgtatagatgagcaccagcagcagcgctaagatctgcaggccgcgaacgacccgccgtctcatgcgatagtaggcggcgggcttgcggagcgccttttgtgcgattgcattggccatcgtcaggtccccgctgccttgtcgaggcgcagcaccccgatgatgatgatcgcgaccagcgcgacgagcaggaagacccaggtcgacgccgccgagccgacgccgagttcctggaagctgatgagccggtcgcgcgcgtagatcgatacggtcatgacgttctcgttgctcgccgccaggacataggcgaggtcgaacatcctgagcgcgtcgagaacgcggaagaggacggcgacgccgatcgccgggcgcagcatcggaagggtgatcgaccagaagcgtttccaggccggaatgccgtccacctcggcggcttcgaatatctccggagatatcagctgcaggccggcgaggatgagcagcaccatgaaaggcgtcgtcatccacacgtcgatgaagatgaccacgcccatgatcagcgaactgctggccgtccaggcgatgccgtgatcgacaacgcccagccccgtcaggatcttgttgatgacgccgaactggtcgttgagcatccattcccagatcttggtggcgacgacgacgggaatggcccacggcaccagaatggcggcccgcgccaggccgcggccggggatcatctcgttgagcagcagcgcgatcgccaggccaagggccgtctcgatcgcgaccgagatgacggtgaacacaagcgtgttcttgacggcaacccaccaggtcgggtcgttgatgacctcgatgaagttgtcgagaccgaccatggaatagaccgacgggtcgtccagataggcgtcggtgaaggaaaagaagaaggtccggctgagcggccagacggcgaccaggaggatgacggcgatcacgggaaccagaaacagccatgcggcccggtaatcgcggcgggcaagtttggcgctcatggttcgttcgcctccgacagtccagcggccggcgggctgaggagaacgcgattgccatcggcggtaaacgcgaagagggcggtatcagtgaaatccaggccgacaggccggccgatgagatcgggggccggggctttcgcgacgcggatcacccagacggtgtcgtcggtgatccggcaataggcgaaatgctcgtggccgaggtcttcgacgcgctccagcgtgcaggtgatgcggccttggtccgcacccaccagccgcagtccctccggccgaatgccgatctcggcgatcggtcccgccgggttgttggcgaccatggcgatcgtaagattgccgggcccgacgatcgtgccggcatccgcgcctgtcttcggcgacacggcgagaaagttcatcctggggctgccgatgaagcttgcgacgaagcgattgtcaggggtgtggtaaagctcctgcggcgttcccacctgctcgatgcggccatgattcagaacgacgatccggtcggcgagcgtcatcgcttcggattgatcgtgcgtcacgtagatcatcgtcgtcttcaggtcgtcatggagctttgcgatctccatgcgcatttccattctaagatcggaatcaaggttggacagcggctcgtcgaacaggaagatttccggctggcgtaccagcgcccggccgatcgccacgcgctggcgctggccgccggagagttcgcgcggccggcgatccatcaggtggtcgaccttgagcatgcgcgccaccgacgaaaccttctggctgatcgcgtccttggccatgcccagcgtttccaaggcgaagccgatgttgcgggcgacgctcatatgcggataaagcgcataggactggaaaacgaaggcgacgccgcgtcttgaggccgggacatcggtcacgtcctcgccgccgatcgtcaccacacccttggacgcggccacgaggcctgcgacgatgcgcagaagcgttgacttgccgcagccggaagggccgacgaagacgacgaactcgccgtcattgatcctgaggtcgacgccctgaatgacggtatgcgtcccaaaattcttcgaaacggattcaagcgaaaccgatgccatttttcacccggacttgatcacgataactggatcgccaccctgccggcggcgattttcgatgcgcgcgacgagggcgggaccgttcgccggcccaccctcgtaggttcagttcgggctcaacggctttccttgagcttttcaagccgtccggcgagcgaggtcagcccggacttgatctcgccgccgcccgacagcatgtcgtggacggcgcgatagaaggcctgcgagacgcggttgtagctggtcccggtatagcccgaggggcgcaccgcgctgtcggcgaaggcctgctggttgtccttgaggaaggggatcttcgccagcacgtcggcgtcgctgtagagcgccgggatcgacggattgaccgcatcctgaagcgcgcgcttcttctgcatgtcgggcccggtgatgaagttcacgaagtcggccgcgacctcgggcttggcgctgtacttcgagacgccgtaatacatcgggccgaggcatccgctcgacttctggccttccgcgccgacgggcagcggcatgacgccgaccttgtcgacaacggcgctgccttccttgtgcgacgtgccccagacataaggccaattgcggtggaagactgcgttgccggactcgaagacggcgcgcgaggcttcctcgtcatagttcagcgtgccctcggggctgatcgagccgatccagccctttgccttttcgatcgcctcggcggccttcggattgtcgatggttaccttgccatcgtcggagatgatcgtgccgccgccgttcgatgcgatgagctcgatcgcgtcgcaggtcaggccttcatagctcttggcctgccatgcatagccccatatatcgcccttgccgtcggcgcgctccttgtcctggatttccttggcggtcgcggccagttcatcccaggtcttcggcggctgcttgccgtatttctccagcaggtccttgcggtagaacatcaggccgacgtccatgtaggcaggcatcgccaccagattgccatcgagcttggcggcgttgagcgtggaggcgaagtgcttgtcctgatcggcctgcgggatggcggtcttcaggtcgagaaggccgttcttgaacatgccgagccagatgacgtcgaggaacagcacgtcgatatccgaggatttcgaggcgatcagctgctgatagatcggaatggcgtcatccagcagcgccggcatcttgttgatcttcgcttcgttgcccgtcttctccttccaggcattggcgacattcgtgcaaagctcgaattccgtcggcgcgcagaacacggaaatcgtctcagcgtgggccgttccgctccagagggcggcggagaacgcgagggcggcaaggctcttcttaagcatggtgggttcccttgattgtgataatgcacggcatcgtcagggctcttctggctccttgccatcaataggactggttatgaccagttatgtcaatatggactttcgagagaattgcgttgaagatgagaagggcagaggcggccaaagcccagggaagatcgaatttgaagacgctcgaaaccgacgacacattgatcgcaacacgcggcgtcatcgatcgcggcgacccgcggccgctgcacaagcaggtgtatgaggcactgctggcggcgatcagcgacggacgtctgccgctgcgcggcaagctgccctccgagcgcgagctcgtcgatctctacgatgtgagccggatcaccattcgccacgctgtgcgcgaactcatccagcagggcgtggtccatagtcagcccggcaaagggctttatgtcaccgagcgcggcggcggcttcgagctgcaggtgctgaagagcttcaccagcatcgcgctcgccaatggccgtacgccgggtcaccagctgatcgaggcacgtctcgttcgggcgccgttggaagtgagcaggccgctctttctcgcccccggcgcggaagtcgtggtgctatcgcgcctgcgcttgctcgacaatattccggccgtgatccagaccgactggatacccgccgggcgcgtgccagcgctgctggcgctcgattggggtatcgccaatcgctcgctctacgaagagctgcggcagcgctacggcatatttccgaaacgcggccagacgacgctgagtgcgcgcctggctgatgatgatgaggcgcggctgctgcagctggcgccgccggccgcggtgctgacagtcgatcagatcgcctttgacgaccgcaatcgcccggtcaacatgaccgcgctcgtccaccatcccgcccgctatccgctgacgctgcttcaatcggaaaccggcgatttcacgcaatactgagtattgtggatcgatggatggtgggcggctgacgatccgccctagccgtctagggcgaacctgtcttcgtcgaactcgtcttccgcgaattcggtgttatcgctatccatggtcggaccgacgtcatccagcgtcgtcagacgcatgccggacggacggggagcggtcatcttgatggtcatgcccggtggctgcagcgcccaggagaccaacgccgcgcccgacatggcgccgacgcccgccgatacggcctgcggttcgcgtgccggaacggcgatcatgttggggcgcttcgccgcgctgccggcgagggagccgcccgcatggcgtgcgagaagaagctggcccgccgagcccttgcccgtgacggcgagggcaagcagcaccggcgcggccggcttgggaatgcttgccgtggcattttcatcaagcgccggcctgaatgtcggcagcggcactgtgagcgacgcgaggtcgggagtggtattgtcggcgcggggcgtcggccgggcaagttgaagttcgaggccgcgttcggcgcgggtttgcggcaccggcagcatcgcggtcacgagactgggcctgggtgcgggcggcgaaccagcatcctcgtcgtcgctctccgacgcgcggatggtctctatcgccacggggcggttgcgctgtttctggtcggcgagcgctagctcatagccgggcagggctctgccgtcggccggcagatgcagcgtacgaccgctgggaaacagccgggcaagttcctggcgcgacatgcgcggccaggcgcgaacattgcccacatcgagatgcacgaaaggcgagcccgaggtcggataatagccgacgccgccgacctgcatctgcatcgcgagcgcgcgcagcgtggcaagcttcacgcccggaatgtaaaagtccatggccttgcccagcatgtgctggctcttcttggcgacgccgctgatgcgcgaacgggtgcgaagcatgttgttcgtggcgggcgagcgataggcggagacgacgttgatgggctccttggccccgctgcgctggtagacttcccaaaccagatcaagcaggcgcggatccatcttggtcggctcgttgcggcgccagtcacgcaggaagcggttgatctgcatcagacccctcggatcgtacttgccgttgcgcttgaagacgatggtcgcccgctctcccgtgtgggtgaaatagagattgagcgcgcgatcgccctcggcagcctgtgcggcgccggccatgccagcgaacatgacaatgacgatcacggccattcgatgcgcaacaagcgacaccgcaagggccagcgtggtcaggggaacggaaaagactgcatggtacacgaacacgacttccgtcattgttgaagggcgcgacggccggaacttgtgatcggcgaagtcgctttgcaggctattatggtcaacagatccctaacgtatggtttatgacggactaattttcgagacaggcaaccttcttggcctcgccgcgtgacgttttgagacgtgtgctgcgcgcaagatggcgtagaatgcatggtgggccgtccgttcgccgagcgtccctaaagcggaaatgcggccgaaaagcgcggggcggtcacaatcctgtcgcttcggttggtatctcttggaacatggttgcagagcagaggagcgagaattgaataatttatacaagaccttggcgatttcgctttcaacaacggcgatgatggcggcgccgatctgggcggcacaagcaccggccgccgatccgctcgtcggccgggcgtgggtcgagaccaagccgcaatccggtctccccggcgtgatgatggtgttcatggccgacggcagtctgctgatggattcgtgctgggaaacctacgcgcttcgcaaatggagccgcgcctcccaggatacggttacctgggacgaagatggcgcgaaaatcaccgcgaaggtgcaatcggtatcgccgactcagctgacgcttcgcgtaaaggccggaaaggatacggtcgagcaccgttacagcgtcgccaaggcaccgtatctgtgccccgacatgaagcgttgaaatggtcaccgcgccaaagagcatgcggcgagccggtatcgtgtccggtccgctcgccgcatgtcctgtcttgattattcgacgtcggctgtctggcgcgtgtccagcgagctgacgaggatcttgtcgatccgtcggccgtcaaggtcgatgacctcgaagcgccagccatccctggtgaagctttcgccgagtaccggaaggtgtttcagctcctcgagaacgaggccggcgaccgtctggtattcgagatcgtcacccagcttcaggctcatgaattccgcgaactcgtcgatcggtgtccagccggagacgagataggagccgtcgtcgcggcgcgcgatcgcctgttcgtcgatcgggccgtcctgcagcgcgcccatgatcgcttccatgatgtcgccggaagagatgacgccctcgaaatggccgtactcgtcgaaaacaagcaccatgtgcaccggcgatgtccggatcgcctggatgacgctgatggcgttggaaagatccgaaacgatcggtacgtcctgcgtgatcgccttcaggtcggcggtgccctgaaccgacatcgcgtcgtagaaatccttgaccgcaagcacgccgagcacctcgtcggagctgccttttcgcaccggtagtcgcgatcgcttcgtgctgtgcagctgggcgcgaatttcgtcaaggctgtcgtccacgtcgatgatctcgacatcgcggcgcggcgtcatcagcgcgcgcgccgtgcggtcggcaagccgcatcacgccggagatcatggcggactcctcgctttcgatcacgcccgcggattgcgcttcggccagcaccgtcttgatctcttcgtcggagacattgtcgccggctttcccggattgcccgagcagcttcaggacgagcttgccggaggcgtccagcagccagacgaggggcagcgccatcctcgacaggaccgtcatggccggcgcgagcctagaggcgacggcttccggttcccgcagcgcgatctgcttcggcacgagctcgccgacgatcagcgacaggtaggtgatggcgatgacgacggtaccgacgcccaccgcgtcggcgacggcgggcgagacgccatgaaactccagccagccggtcaggcggctgccgagcgtggcgcctgaaaaggcaccggagagtacgccgaccagggtgatgccgatctgcacggtcgacaggaacctgccggggttttcggcaagcttaatggcttgtgcggctcctctgcttccgtgatcggcgagaactttcaggcgggcgggtctggaggacacgaccgccaattccgacatggcgagcacaccattcacaatggtgagcaagaccacaattccaatttcgagaaacacaggagcccttgttcgttgacgatgatgacgcaagataggggcattcacaccggttgcaaagcggcggtcacgattttatcccgcgcgaaatcgcgtaaggcatcgcagccatctgtttggtaaattagcattataagtcagaagagcttaactttcgtctgttagaagagcgcctgtactttttgtgatcacgtgtatggccgacgaagagatactgccaccagagatcctgacttcgatattgatgcgaatgttcgagttcgcaccgatcgccatggccgtctcgaccagcgacaccgagacatctagctatctcaaggtaaacgacgcctatctcaggctgacgggccttaaatgggaggatatcagcgggaagacgctgatcgcggaaggggctgcgatcagcagtccggcgcgtgaccggcgtcaccggatgctggccgaggaaggtggctacgtgctggaggaagtggatatccgccatgccgacggtaccgtcctgccgacgctgatctccgcgcaacgcacggtcatcgatggcgtatcgttcgatgtcgaagtcattctcgacatgtccgcgcgtgttcgccaccagcacgagatcgaactcgcactccgggcttcggcgcgcaccgacgcgctgtcgggtcttcccaatcgcgcctgtttcgatgaggttctggccgaacacctgcagcggcgcgacgacagcgagaagctcttggcgctggccttcatcgatttcaacggtttcaaggccgtcaacgacacgatggggcatggcgcgggcgatgaggtgctgaggatcatcgcgagccgttttcgcgacagcttccgcgccaatgatttcatcgcgcgcatcggcggcgatgaattcgtcgtgcttctggaagtcgatccctcgcatctgaacgacgtggaactgacgctcaaggacgcggtggatcgcattttcaagccgatcgccgtcgaaggcgtggttgtcgaattgggcgcggcgatgggggtcaccctgcttcagccggaggacgacgcggcctcgttcgtgaaacgcgccgacaactacatgtatctggcaaagcagaccggcgatcggctcgccatgatctggctcggccaagccggcggaattgaagtgagcgcaaggcttgtcaccggtgttacgggttgacccgtctcggtcgccttgatggcaccgtgatcagtattcaggcagcggcggcaactcgccggcagtggcatcgagctctgcctgaacggccttcatcgtttcgcgttccgtgggaaatgggttgctgtcgaccgagggcagttcgccgttcatgtcggacacgcgatagaaccaccgctcgttggcgccgttgatcgtcagccggaacctgccatggctggcataggcccggccggtggtgtcacgcttccacacggagtgatggtgacctgtcctcgacctgaataggcgcattgcgcatcctttccgcttttgatcacccggaatactatccccagtatgtgatataaagcgatgacgcccgcaatggtttcatagttcttacgaaaatgtcaggcacccgcttcgcggaccagaacttttacaacctggcgccaaacccgcccggcaatactttcgcccttgccgttcaatacgaccacgcctctcactgtctccgacaaaggcttgccggatacctcggcggtgatcgcatactgtgccgaaacagggctgaggcgcggtcgctcgcgggcgttttgcgggtggacggcgatttcgccgcgatactccgaggtgagctgcggaatatcgatttcggaggcgccggccgaagcgatggaggtgagcagcacgggcatcgaggactgcgagatatcgtcggggatgaagcgtcccgccgcgccgacttcgaggcgaccgcggtcgccgccggacacgaagccgcgcgccgccgtgccggacgcaccggcgattgtcgccagctgatccttgcggctgatccaccggcccaggtggacctgcggatctatgtcgatcacggtaccgtcgaaaggcgcgcggacgatcagtgatgcctgacggcgtgcaagcccgtcgcgcttggcttcgagtgccgccagttgcgattgaaggatgccgcggtcgacgaggttttgcggatcggcgagcacgcgggccaggcggtagcgcgtcagctcggcctcgatctcggtcgtgcgcagttcctgctgcagctcgggacggctgatcgaaaacagcacgtcgtttttcttcacgacatcgccgcgcttgatctcgatcgcctcgatctttccgggctccatcggaaaaagtcgcgtgaactcgttgggataaagcgctgccggggcggagacgttcttgaatatgggtaacgagatcaatgcgatgatcgcaaggaagattgccagcgacaggtaggtgcgtctgctcgtcttgatgtcatggcgcatggtccaccactcccgaagttcggacaggattggccgaatgatgaagaagccgatctcgacggcgaatagcatcacacccacgatcttgatggtgaagtgatagacgaggagcgcaattccgaaatagagaaacagccggtagatcgtcgtggcgatcgcatagagcgtcacggtcgcgtcgagtttcgggccgaagcgatccggcctctcttcgtcggtgtcgaacagcagatgccgaagccgccagcgcagatgccggaatgcgcgcggctgcaggttctcgacgcctaggagatcggcgaagatgtaatagccgtcgaagcgcatgaacggattgatgttgacgatcaggctgagcacccagccggtggccgcgagaacgaaggccgccgatcgaaacggtccgtcggggaggaagacccagaaaagcagcgcgaacacggcgatatgcatctcggtcagcacgccggccatgtcgatcttcaaccggtcgaagcgtgacttcagccgccatgcatcgctgacatccgtgtagagcagcggaaccagcaccatgaaggcgatgcccatggtgggcacgcggcagccgtggcggtgcgcgacataggcgtggccaagctcgtgcatcgacttgatgaccgcgatcgagacaacggagaccacgatgccttccagcgtgaatacatagggaaaggtaccgatgaaggcatcccattgccgggaaaccagatagagcccaagcatggcggcgcagatggtgaaagcctggaaaacggggctgaagaacaccgaaacgtaaggtgccgtcttgcggatgaagcggtccggccgcaccagcggaatgcggaagaagaggtagttgtggatcagccgcatgaagagcgagtgccggtgggtcgcgccggcgtgaagcgcccgccaggtggcggatgcaggctccgttacgaagaagctcctttccagcattcgcatcgcggcgtaaatctcttcctgctcgggaagccgcccgaacttcgtatgcaccgcctgaatgagaccgcgcagcgaacgcgcgacgttccagagcgacaagagctggaacatctcgaacgtgatgcggaagaagcggtttcggatcgggtcgagcacgatccagaccggctcgccggacaggctggtgccgccgcgcacgatctgcagatcttcgcgcaaggaaggcagcctgagatcgggcgagggaggcgccgtcataggccgagccgctgcctgatggccgcgatcggcctgcggaacagatagtaggcgagcggcactttctcgccgaagatctgcgatgttcctcggatgccgagacgcagcccgcgctccggcgccgcgtcaaagccggcatagatgcgataggcgagaatattgccctcgatcatctgcggatcgaaggaggacgacagcgccttcgccgcaaccggacgcagcggatcggaatcgagaaatgcactgacagccgcaccgttctcgaccgcgatcgcgtcggcgaccggcacgtcgatgcgcagctgaacgcgtttggggtcggctacctccatcacccgctcgccgatcgataccggccgaccgatccagtcccgcttatcggtgaagatgaccacgccgtccgtctcggctttcacgtcggtgcgcgccagcatgtcggcggcgtagtcccgcttggccgaagcgacactcagttcgctcctggtcaccgccagatcgcgccgcgcttccgggtcggcaatcgcgcgctgactgatctgcatcagccgcgcctgagccaccttcacatcctgttcggcgacgcgcagctcgtttcgaagcgcggtatcggcgagcctgaagagcggctgtccctttaccacgctcgcgttcgggttgacgaggatttcctcgatcgcgccgtcgagcggggccgccacgatctccggagagacgggaacgacctcgctcggcgccagcaccgtcatgtgcacgggaatgaacatcgcggccagtgccagcaaggtgacgatgccgagcagcggcttgatcggcagcttgcgcttcagccgtctcggtccgctcagtgcgcgccaggcgtgggaataggtctcggccagcctttcggcaaccagcagatccgcctccggccagggcgtctctcgtgccagaagcatgcccgcgaagatatggccgtcgcgcagtcgaaacggcacccaggccatgaatcggaacgggtagctgtcctgttcgatctcgcccggcgggcaataggcgggaagggtaaaggccttgatcttcgccagcccggcctcgcgggcaagctgcctgacgagaccctcgatgaagcggatgcgcggtgcgtttcgatcaaccgcgccgatcgacgacaccgtctcgaccttgaaggcgcccttgggcaccgaaagcacgaagatctgccgcgccttggcgagcttcatcgtctcgttggcgatgaggaaacgcagttcgcccacgctttcgacgcgccgcgcctcggcttcgatcctgagcagaagctcgtaggcatgctgggcggcggctgccggtggctgaagcttgattggatcgccaactggcttttcgacaccttgcatcgtgctcgcctactcactcggaattctgaactgggtgggaccgctcatgcctggcaggatgccggcggcatcgccggagaaacgcccggtcaccttcacggtctggctgaccggatcgacggtcgcgccgatgcggacaatgtcgatcggcagggtcttggccgtctcgtcgacgctcagcgaaaactgctggccttcgcgcagccagcgcagccagacggacggcaccagcacatcgaccaggaggtcgttgctggcgacgacatgcatgattggccggctcggttccggggtctcatgcgcgcgtgacggcatcgccccgatccggccatcgaagggcgcctttatcgtgcagcggccgagcttgctgcgataggcatcggcctcgcccgcggcctggtcggccttggcgcgcgatatctcgacttcgaattttcccgccgcgttcgagcgcgccagccgttcgtcgttggcaagggcgatcttcgccgccgccattgccgcctccgccgatttgagctgagcctggatatccccgcattcgaaggtggcgaggatatcgcctttcctgaagctctctccttccttgaagggcagggtggcgatggcgaagccgagatcgctcgatatcgaggcttcgtcggcggcgcgaacgatgccgcgcagcccttcgagcgatgcggcggcgcccgggacgtcactgtcggcggcgtgggcaacgccacccgccagaagctgtatgatcagaacggatgccgctaggtgcttcatcacggtctccatgccggccgttatttggccgcaacgaggtctgtcttcaattcaccgcgctccagccacatctcgcgcaattggccagccatctccttgacgggctggttggtgcgcaacgtttgcgggaacgggtcgatgccgagcgaggcgtagatgttggcataggcgttctgcaggtcggcataggccatatcgagtttcgcatccgccagcagggcattcatctcctcgcggatcagcatctgttcgctggtcttctgggcgtccgtctcggtgcgcacctgcgtcaggatccggcgtgaaacgttggaaagggcggctgccgtggaataggagttcttcaggtgggcgtagcgggcgcggctgatatggacctgtgtcatgaccgccatggcaaccgagagcgagcgcgtgtcgagcatctgcttttccgcctcgatcttcctgttcacagcaggcagcgtcgcgagcttcatcagattgaagctgaccttggcgccccacgacacccagttgttggtggcgatgtagtcgttcgaatcgtagttcggtccggcatagagattgatgccgggcagcatgtcgagcagcgccgcatccacctcgcgcccgttgatccgcagccggtaggaaatctcgcgcatttcgggccggttggtggccgcgatattgaacatctcctccgaggtgtagttgatcttcagctgtgtatcgcggcgcttgggcacctcgagcgtgaactccgtgcctggcttcacgttcatcagcgcggaaagctgggtcttggcgacgagcagttcgccttccagaagttcgacctcgcgcttgacctcgatcagttcgcgctcataggtcagcgcgaccagcggcgacgtctcgccgttggacgaaagattgcgggtgtccctcagggcgcgggcgacgcggccttcaagcgcccgcatgcggccgacgagacgctggtagctcacagcgcgccaataggccgtgcggacatcctctatgaccttgttgaccatccgccgcttcatctcatcctgaaccagcacctcgtccgtcgcctgcttggcgcgcacataggagaggccgaaatccaggatgttccaggaggaggtcagatcggctgtaacaatactatcatcgcgggtagaggcctcggtcgggtccgcttcgttgcggccagcataccctgcgccagctacaatcttagggagtgcggaatagcttaccagatccgcctcccgtaatttgagcgccgcctgcataacctctaccttcgtgtcaagattgtatttcaacgctctcgccatggcttcgtacaagtccaccttaccggagatgggctcctgatcggcggtggcaagggcaagcctctccttgccgaagcttgcatgcgcttccgggggtagcggtttcggggtgacggtgcatcctgtcgcgatcaggctgacggaaaccactagaaagactgggaatttcattaaatcattcctcgaacctgttccgtacacgactaagccgcaggtagctgatgtctacggatatgcaattgcgtggcgtaaattcggcaatcagagcgcgcttttggaatgcgaaactgtcgtctgagtgctttcagtctttgctaacatggttaatcaacacttaacaaaacacaatttttcagggcattctttattggtgtgtgctaaatgatgtgtcgaacggatacggctgactgctcctgcaatggttgatttagtacaggctaattcctgatgcggaaaattagggaattgttaattctctgctcactacggttgaaaataccggtcttgggagccggtcgcgaggatgactgaacagcaatagacacgcgccgggtaattgggcacccggtcaacgaaacgatctgtcgtggaggaaaccccatgaacgaacgctacgttcgccccgcccctgaccgcgtcaaaaagatgcggggtaggaatgccaagccgacatacggctcgatgttgatggagttggaacaacgcatcgcattcgacgcagccggcgctgcgaccgtggaaaaatcccaggaaaaaagccagcaggatcaaacggatcgtagcggggcggacgctgttcagcgcgacaccacgagtgacggccgcgatgcgcttgtcgccgcgctcgccgaacgccaggccgcttcggcgccacccgagggccccgcgacatccgccgtttcgcaaccgcgccaggtggtggtgatcgattcctcagtgcccgactacgaggcgctggtcaaagaccttggcgacaatttcaaggtcgtggtggtcgatgcgaacgagaacggcgttcgcgaactggccgatacgctttcgtccatgcaggatgtcgaagcgatccacatcatatcgcacggcaaggagggtttcctgcagctcggctccgcgtcgctgacggccacgacgatggcgaccgactacgccgccgatctgacatcgcttcgcgattcgctttccgatgatgccgacattcttgtctacggctgcaatttcgccgagggcgatgggggcacgaatgccgtcaagatgctcggctatctcaccggcgccgacattgccgcctcgacggacccgacggggagtgccgcgctcggcggcaattgggatctcgaataccgcgatggcgatatcgcttccgatgtgatcggcacggagaggagccaggcggatttcgccgaaacgctgaatgtcgcgacctccaacggcaatggcgcgttactggtgtctgccggtcggtcgatctacagcgtcgatgtcctgaccggcaaggcgacgatgatcacgacggttccgacctccgtcggcggcatcacggtgtcaaacacgatcaactcgctggccgccgaccagacgaacggcttgatctactatgtcgatagctcgaccgatccggccaacaaggcgctgttcgcctacgattacatcaacaacacccacatcctggtcgattccgatctgaccacgggcgctacgaccaatattgtcacgggcacgaccggtgtcggcggcggcgccgcgacctttttcaacggcggcctctatctcggcgtcgaaaacattaccggcagcaatgaccagatctaccgaattactttcagcaacaatggtcgcacgatggcgggcgcgacggcgttcggcgcgcagatcacgacagcgaacgactggggcgatttcgcaatcgatgcaacaagcaacgcgctgctcagtatcaacgcttcgacgattacccgttacaacctggcgaacggggcgatcatcgacagcttcaccaacgtcggaggcagcaccggcgcacagggcggcggcgatatcaacggcaacacctatctcgtcggcaccgatatccgccagatcaacccgacaaccggcgccgccattggctcggccgttaccatcaccaccaacggcacgaccgcgctcaccggtatctcggacgccgcgcgctggacgccgccgaccgggacaatcggcgacaagatcttcaacgacgtcgacaagagcggaaccttcaacaccggcgatggcggtatcggcggtgtcactgtccagctgatcgacgacgtcaacggtgatggcctggtaagcaccggcgaacgcattctggcgacggatacgaccgacgccaacggcaattatttgttcaccggcgttctccccggccagtacatcgtgcgcgtcaccgacgcgaacggtgtgcttggcacggcgacgctgacgacggcaagcacgacacaggcggtcacgctcgccacgatcggcgccaccaacctcgcggccgacttcggctactatgcccagccgcccgtcgtcgacctcaattccggtacgacgccgacgcagatcatcaccaatggcggcacgccgggcaccaccggctggacgatcggcggcacgggcgcgacagcgaatgacgggtttgcatggacgctcaatggcggcaccggcacgctcacccaggcgaacgtctccggctggaccgacggtctcgcgccatcgggcgcggcacagctgaccttcgatgtgggttggagcaacaacctgctgctcggcatctccaacgacaacaataccccggcgacgctcgacgtcacgatcggcggcgtgctttatgcgcgtatcacgaccggcacgctcaacggcacgccgaacaccgcgaccatcacctatttcaacggcgcatccggaacgccgtccaccgtcgccgcatcggccgccggcaccaccgcctggggccgcaccgcggtcaccatcaacctgccatcgacggtggtcgcaaccggcgatcttgtcttcagctattccgcggccggcggccttctgacgccgagcacggatgatatcttcatcgacaatgtcagcgccttgcgcaatgtcgataccgttgccggcgtcaactacacgacgacctacacggaaaacggtgccggcgtgtcgattggcagcaccgcgaccgacgtgcgcgatctcgacagcaccaacatgcgctcggcgacaatcgtgctcaccaacgcgcaggccggcgacgtactcacggtcggaacgctgccgagcggcatcaccggatcggtcgatacgacggtcgccgggcaggtcaccgtcacgctgacgggctcggccaccaaggcgagttatgccgcggcgatcaaggccatcaccttctccaacaccggcgacaatccgagcacgacgccgcgcgtcgtcaatgtcacggtcaacgatggcggcctgtcgtcggccgtcgcgacctccaccatctcggtggtcgcggtcaacgatgcgccggtcaacaacctgccggccagctggacgacgaacgaggataccagcctggcgctgacgggcctctcggtcaccgacctcgacgccggtactggctcgatgacggtgacgctgagcgtcgcctccggcacgatcacggcgacggccggcggcagcgtcggcgtttctgggtcgggaaccggcaccgtggtgctgacaggtacgctcgccaatatcaacgcctatctcgcctcggcgtccgcccccgtctacgttcccgtcgccgatgccaacggcaccgtcgtactgaccatgacgaccaacgacaacggcaacaccggcacgggcggcgcgctcaccgatgtcgatacgcgcaatatcatcatcaacccggtcaacgacgcgcctgttctggatctcgacggctcgacgaccggaaccggctattcggtcggttacacggaaaatgccaccggcgtcgcaatctccaacaccaacagcagcgtcatcgacgtcgacaatgccaacatggcctcggccgcgatcgtgatcaccaatggccaggcgggcgacctcctcacggtcaccggcaccctgccatcggggatcaccgccagctacaacgcaacgaccttcaccctgacgctgtcgggttcggcaaccaaggccgcttacgagaccgccctgcgtcagttactttatacatccagctcggacaatccgacgctgaacggcgccgccgcatcgcgcaacatcagcgttaccgtcaatgacggcgccgccaattccaacaccgccgtcaccgccgtttcgatcaccgccgtcaacgacgcgccggtcaatacgctaccggtgagctggacgaccaacgaagacaccagcgtcgcgctgaccggcctgtcgatcacggacccggatgccggaacgggctcgatgaccgtccggctgcaggtgccgacaggcgtgctgacggccacggccggcggttccgtcaccgtttccggttcgggtaccggcacgctggtgctaacgggcacactggccaatctcaacgcctacctggcatcgagtgcggcgcccgtctatgtgccggtggccgacgccaatggcagcgtcaccgtgacgatgacgaccagcgacctcggcaatttcggcaccggcggcccgctgaccgataccgacacggcggtgatcaacatcacgcccgtcaatgatgcgccgatcctcgatctcgacgcatcgggtgccggcaccggcttcaccgcgacctacaccgaaaacgaccccggcgttgcgattgccgatacggatggcgtgatcaccgacatcgacagcgccaacatggcctcgctgtcggcggtcatcaccaacggtcaggctggcgacattctggccgtggcaggcacgctgccctcaggcatcaccgcgagctacaacgccgcgaccttcaccctgacgctcacgggttcggcccagcgcgccagctacgagacggcgctgcagcagatccgcttcctgtcgagctcggaaaatccgtccaccacaccgcgcagcatcaacgtcacggtcaatgacggcgccgccaattcgaacgtcgcggtcgccatcgtcaacgtcatcgccgtcaatgacgcgccggtgaatacggtgccgacgtcagtcacgctgaatgaggacgtgcagaccgcgatctccggcatttccgtgagcgacgtcgacagcggctcggtcacggtcacgctgtcggtcgcgaatggtacgctgtcgccgtcggtcatcgcgggaaccgtgacggggaacggaaccgcatcggtcactgtctcgggcacgctcgcgcaggtcaacagcgtgctcgcctcgctgcgctacaccggccgcgccgactataacggctcggacacgctcgtcgtttccacgtccgacggttcgctgaccgacacggacaatgtcgcgatcacggttacgccggtggccgatatcacgccggatacggtagcgaccgcggaagacacggcaatcaccttcaacgtcatcactgggacgaacggcgcaacggccgataccttcaaggaccccggccgcgccgtcacgtcggtcacgcagccgccggccggacagggcagcgtcaccttcgccgcggacgggacgctggtctatacgccagccgccaacttcaatgggcagacgaccttcacctacacggtcacctcgggcggcgtcaccgagacggcgaccgtcacggtcaatgtcagcgccgtcaacgatgcgccggtcaacagcctgccggcatccggctggagcaccagcgaggataccgcgatagcgctctccggcctgtcgatctccgacgtcgatgccggcaccggcacgatgacggtaacgctcgccgtttcgggtggcacggtctcggcgagctcgggcgccggtgtcacggtctccggatcgggatcgacctcgctcaccctgtcgggcacgctttcggcgatcaacgcctatctcgcgtccgccgccgctccgcaattcaatccggccgccaatgccagcggttcggtgacgctgacgatgacgaccaatgatggtggcaatactggctccggcggcgcgctcaccgatgtcgacacgcgcaccatcaccatcgatcccgtcaacgacgcgccagtcaacacgctgccggcgggcggctggtcggtcaacgaggatacggcgctcgcgctgaccgggcttgcgatctcggatgtcgatgccggtagcggcacgatgaccgtcgtgctcggggtcaattccggacagctgaccgccgtatccggatcgggtgtgacgatcagcggctccggcacctcgtcgctgacgctgtcgggcacgcttgccagcatcaacgcctatctcgccagcacggcgcgaccggtctacacgccggtggccgacttcaatggcgcggtcacgctgacgatgacgaccaatgacggcggcaacaccggttcgggcggcgcgctgaccgacgtggatacggcgaccatcaccgtcatcgccgtcaacgacgcgccgacgctcgacctcgatacatcggcggcaggcaccggctacgcgaccagctacaccgagaacgcggccggcgtcgccatcgtcaacaccggcgttctcgttgccgacgtcgacaacgccaacatggcatcggcgacgatcatcatttcgaatgggcaggcgggtgacgtgctggcggtcaccggcacgctgccatctggcatcaccgccagttacaacgcctcgacctttacgctcaccttgaccggttcggcgaccaaggccgcctaccagacggcgctcggccagatccgctatgcctcgacctccgacgatccgggtgcggtgacccgatcgatcaacgtcaccgtatccgacggtgcggcgtcatcgaacacggccgtgacgacagtcgcggtcacgcccgtcaacgacgcgccggtcaacacgctgcccacgggcggctggactgtgggcgaggacggaacgctgtcgctgaccggcctctccgtggccgacccggacatcggttcgggcacggcgacggtgacgctgtcggtcggctccggcgtgctgacggccgcgagcggttccggcgtgaccgtcaccggctcgggcacctccgctatcacgctgtctggcacgctttccagcatcaacgcctatctggcgagcaccgcccggccgacctatgcgccggtcgccgatttcaacggcagcgtgacactgacgatgaccagcagcgacgggcagctgaccgacacggacacgcagaccatttcggtgacagcggtcgccgatatcgccaacgatacggccacgaccaacgaggacacggcggttgtcatcgccgtcgatgccaacgacagcttcgaaaacgccggccacacgatcacggcgatcaacggctcggccatcgtcacaaacggcgtggtcaacgtcgccagcggcacggtgcgcctcaacgccgatggcacgctgaccttcacaccatcggtcaacgtcaacggcagcacgagcttcacctatacggtcacctccggcggcgtgaccgagaccgcgactgtcaacgtgaccatcgtgccggtcaacgacgcgccggtgaacaccgttccgggcgcgcagaccgttgccgaggatacgccgcttgtcgtatccggcgtgtcggtcgccgatgtcgacggcgatgcgctgaccacgactgttaccgtcaccaacggcatcgccaacgtgacgacgggaaccggggcgacgatcgccaacaacggcacgtcgacagtccggctgtcgggcacggccgcgcagatcaacgcggcgctggcgggcctgacctacaccgccaccgccgattataacggcgcggcgcaactgaccatccagacgacggatggcaccctgaccgacaccgacacggtggcgatatcaatcacgccggtcgccgatatcgtcgccgacaacctgacgaccaacgaagacacggccctcaccttcaacgccatcaccggcacgaacggtgcctcggccgacaatttcgagaatgcgggcagggcgatcacatcggtcacgcagccccctgcaggccagggtacggtcaccttcgccgccgatggcacgattacctacacgccggctgccaatttcaacggcacgacgagcttcacctatacggtcacctcgggcggcgtaacggaaaccgcgaccgtgacgatcgtggtcaaccctgtcaacgacgcgcccgtcaacaccgtgccgccggcacagacgacggcggaagatacctccatcgtcttctcgtcctccggcggcaatgcgatcgtcgtctcggatgtcgacaatggaacgctgacggtgaccgtcaccgtcaccaacggctccttctcgttgtccggcatatcgggcctgtcgttcagcgcgggcgacggcacggccgatcagacgatgaccttcaccggcaccacggcggcgatcaacacggcgctcgcgggcgcaagctacgcgccggttgccgattacaatggcacggcgcagatttcggtgcagacctccgacggttcgctcaacgccaccagcaccatccctgtcaccatcaccccggttgccgatatcgccaatgattccgtttccacggacgaggacgtcccggcggttatctcggtgctcgccaatgacagcttcgagaaccctgctcgggcgatcaccgccgtcaatggaaccgcgatcacggcaggcggggcggcggtcactgtcgccaatggcactgtgcggctgaacgcctccagccagctgatcttcaccccgacgctcgattataacggcgtgacgaccttcacctataccgtcacctctggcggggtcaccgaaaccgcgcaggtcagcgtcgccgtggcttcggtgaacacaccacccgtcaacacgctgccgccctccttcaccgcgatcgaggatacgtctctcggcctcgctggcctgcagatcagcgaccaggatgctggctccggtacgatgacggtgacgctgtcggtcaattccggcgtgctctcggcgcttggcgccggtggcgtcacggtgaacggctccggatcgcaggctctgacgctgtccggcacgctggccgatatcaacgcctacctcgccggcgcgacgcgcccgagcttcacgccatcagccaattccaccgccagcgtcacgctgacgatgaccaccaacgacaacggcaataccggcggcccctcgctcgtcgatatcgatacggcaacgatcgcgattacatcagtcaacgatgcgcccgccggcaccgacaataccgtcaccatcaacgaggacagcgtctacaccttctctgccgcgagcttcggcttcaccgatccgaacgacagcccggccaacagcctcgccgccgtcgtcatcaccaccctgccgaccaacggtgtgctctcgctcggcggcacggccgtcaccgccggccaggtgatctccgccgccaatctcggcaacctcaccttcacgccatcggccaatgccaatggcacggcgctcgcctccttcaccttccaggtccgcgacaatggcggcacggcgaatggcggccaggatacagaccagagcccgaacaacttcaccttcaacgtcacggccgtcaacgatgcgccggtcaacaccctgccggctagcttcgggacaaacgaggatacggcgctgtcgctggccggcctgcaggtcaccgatgtcgacgccggctccggtgcgatccgggtgacgctcagcgtcaattccggcacgctcgccgccaccggcgcttccggtgtcaccgtcagcggctccggatcgggcaccttggtgctgaccggcacgctctccaacatcaacggcttcctcgccgcagctggcacccggcctgtgttcaaccctgccgccaacgccaatggcgcggtgacgctcacgatggtgaccaacgacaacggcaataccggcagcggtggcgccttgtccgataccgatacggcgacgatatcagtggccccggtcaatgacgcgcccgtcggttccgatacggcgatcaccaccaacgaggatacggccttttccggcacgctgcctgtcgcgaccgatgtcgacggcgatagcctgacctatggcgccggatcgatcgcgccgtcgcacggcaccgtcgtggtcaaccccaacggcacctacacctacacaccatcagccaatttcaacggcaccgacagcttcacctatagtgttaccgacggtaccgccacggtccaatatctggtcagcgtcaccgtcaattcggtcaacgacgcgcctgttggcgtcaacgataccgcccaaaccaatgccggcgtcagcacgagcctcaacgtgcttgccaacgacaccgatgtcgatggcgacgtgctgcaggtctcggccatcaacggcgtcgccggcaatgtcgggcttgcggtcacgggctcgaacggcggtacgttcacgatcggcgccaatggtgccgcggtgttcaacccgggcacggctttcaccgatcttccggccggccagagccgcacctccagcgtcacctaccagctgtcggacggccgcggcggcttctcgacggcgacggtcacggtgacggtcacgggtgtcaacgatgcgccgatctccacgccgatcgccaaccagaccggcaacgacgcgcagtcggtgacgctcaacgttgccggcaacttcagcgatcccgataccggcgacacgctgaccttcaccgcgaccggtcttccctcgggcctgacgatcaacgccacgaccggtgtcatctccggcaccatcaaccgcagcgccagcgtcaacggtccctatgccgtcaccgtgacggcgaccgacggcagcggggcgacagcgaaccgcagcttcacctgggccgttctcaatccgcccccggtggccgccgccgacaatctggcgacaaccgagaactctccgctgacgggctccgtcttcgtcaacaatggcaatggcgtcgataccgatcccgatggcgatccgatttccgtctcggcggtcggcggcagcggcgctggtgtcggtcaggccgtggccgggtccaatggcggcaccttcacgatcaacgccgatggcacctacgccttcaatcccggcactgccttcgacgatctggccgccggcgcgacgcgcgtcacgaccgtgacctacacgatcaccgacggccagggcggcttctcgacggcaaccgtgaccgtgacggtgaccggcctgaatgatgccccggtcgcggtggccgatagtttcaccaccaacgaggacacgtccgtcaccttcgacgtgcgcgcgaatgacagcgatgtcgacggcggcacgcttggtgtcacggcgatcaatggcacggccatcgttgccggcggttcggttgccgtcaccggcggcgtggtcacgctcaatgccgatggccggctgaccttcacgccgacggccgattacaacggccgaccgaccttcacctatacgatttccgacggccagggcggcacggcgagcgcaaccgtcaccggcaccgtcaacccggtacaagacccgccggtcgccgccaacgacagcttcacgaccgacgaggataccgctgtcaccttcgatgtccgcaccaacgacggcgacgtcgatggcgatgcgctggccgtgatccagatcaacggctcgactatcgcgtccggcggctcggtcgccgtcaccggcggcagcgtccggttgaacgccgatggcacgctgacctttacgccggcagccaattacaacggcaatccgagcttcagctacaccatatccgacggccacggcggcacggcgacggcaaccgtcaacgggacggtcaatcccgttcaggatccgccggtggcgcaaggtgatagcttcacgacgccggaggaccaggcggtcaccatcgccgttctcaataacgacagcgatccggacggcgacgcgctgacgatcacccagatcaatggcaccggcatcactgccggcaggtccgtggcgatcaccggcggcatcgtcaccttgaacgccaacggcacgctgaccttcacgccgaccgcgaatttcaacggcagcccgagcttcacctacaccgtctccgacggcaatggcggcagcgcgaccgccaccgtcagcggcacggtaacgccggtcaacgacatccccgtcgctgtggccgacagcttcacgacgccagaggatacggccgtcactttcgatgtgctcggcaatgacagcgatgtcgacggcgacacgctcaccgtgaccgcgatcaacggcgccaatatcgcggccggcggggtggtggccgttaccggcggcacggtgcggctgaacgccaacggcacgctgaccttcacgccgacggcgaatttcaacggcagcccgagcttcacctacaccatctccgacggcaatggcggcactgcgaccgccaccgtcagcggcagcgtgacgccggtgaacgacgcaccggttgccgtcaacgacagcttcaccacgcttgaagacacggccgtgaccttcgatgtccgcggcaacgacagcgacgtggatggcgatgcgctcaatgtgaccgcgatcaacggcaccgcgattgtgtccggcgggtccgtggccatcacgggcggcagcgtcaggctcaatgcgaatggcacgctgaccttcacgtcggcagccaattacaacggcaccccatccttcacctacacgatctcggacggcaatggtggcaccgcgacggccaccgtcaatgggacagtcacgccggtcaacgacgcgcccgttgcctccgataccaccgtctcggtcgatgaagatggggtgatctcgagcaccctgcctgctgcgaccgacgtggacggcgatgcgatcacctatgccgctggcagcaccacgccggcccatggcaccgttgtcgtcaacccaaatggcacctacagctacacgccatcggccaatttcaacggcacggatcggttcacctatgtcgtcagtgacggcaagggcggcagcaacgagtatacggtcacggtcaatgtcgcgagcgtcaacgatgcgccggtcggcacgccgcttccggcccgctcgggcgccgatggcgcagccgtcagcttcgatgtttccggcttcttctctgatgccgacaacgataccctgacctattcctcaagcggcctgccggtcggcctgtcgatcaacgcggccggcgtggtgacgggaacgatcgatcgccaggcgagtgtcggcggtccgaccggcaacggcgtctacacggtcaccgtcagcgtcagcgatggccgcggcggcacggccagccagagcttctccttctcggtcagcaacccgccgccggtcgccgtcaacgatgccgtcaccgcgaccgaggacacgccgctcaccttcaacgtgctcgacggcacggccagcggcggcgtgccggacagcgatcccgacggcgatcccctgacggtcacagcggccagcgcagcaaatggcactgtgacactcggcaccggcggccagatcacctatcagccgaacgccaacttcaatggtaccgatacgatcacctatacgatctcggacggaaacggcggaaccgcgaccgcgacggtcaccgtcaccgttctcgccgtcaacgacgcgccggtcggccagcctatcgccgaccgcacgagaaacgacggcgataccgacagtctcaatatctccgccttcttctcggatgccgacggcgatccgctgacctatgccgcgagcggcctgcccgcgggattgaccatcgatccggccaccggtctggtctccgggcgtattgcgccggaagcctcgggcccgaccggcgaggccgtctatacggtgacggtaacggcggcggacggcaagggcggcacgacgtcggtcaccttcaactataccgtcctcaacctgccgccgatcgcgcaggacgatttcgcgaccaccaacgaggacacgcccgtcgatatcgacgtgcttgccaatgacggcgacccggatggcgacaatgacgaggtcatccgcgtcaacaatgtggtgctgcaactgaacggtccggcggtcgcgacgacgaacggcacggttcgactggtcgatggcccgactgatcggccggtgctgcgcttcacgccgaatgccaactacagcggtcaggaaagcttcagctactcgatcgatgatggaaacggcggcgtcgataccgcgacggtgacgatcacgatcattccgcagaacgatgcccccgaggggaccaaccccataccggatcgcgtgcgggccgatgggcagcagctgatctatcgcgtctccgatttcttcgatgatccggacggagatacgctgaactacacgataacaggattgccggccgggttgagcttcgaccaggcgaccggtctcatcttcggcaccatcgatcataacgccagccagggcggcaccgcgggcgtctatcaaatcacggtgacggcgcatgacgggccgaacgggaccggcgcgtccgtctcacagagcttcaagctcgaggtgacaaatccgggaccgactgctgtcaacgacaatctcgcgatcaacgaagatcagtccgcgacgttcaacgtcatcaccggcgcgggaacggcgagcggcgcctcgggcgcggacaccgacccggatggcgatacgctcagcctgattgccgcctcggccggccagggaacgctgacctttacggcgaacggttcgatcacctacgtcccggctgccgatttcaacggcaccgacacgatcatctacaccatctccgacggacagggcggggtctcgacggcaaccgtcacgatatcgatcaacgccgtcaacgacgctcccgatgtcagcggcccgcttccagcgcagatggacagcgacggccagaccgtctccttcgacgccggcatctatttctccgatcgcgacggcgatacgctgagctatgccgcgaccgatctcccgcccggtctgcagatcgacgccgcgaccggcgtgatctcgggtccgcttcccaacaacgcctcgcgtcccgaaccctatgtcgcgacgatcaccgtatcggacgggcagggcggcacgatctcgcgcacgattacctggatcatcagcaatttcccgcccaaggcattcagcgacgtcctgtcggtcgggcaaaacagcagcggtagcggcaatgcgctgaccaacgatacggaccccgatggcgacgccctgaccatcgaccggatcaacggccaggcgggcggtgtcggccagccggtcgcgggttcgaacggcggaaccttcacagtcaacgccaccggcggctacagcttcaacccgggcagcgatttcgccgatcttcgcgccggcgagactcgcacgacgtcggtcacctaccgcgtgacggatgccgatggcgaaagcgatacggcgaccatcaccgtgacggtcaccggcgtgaacgacaatccggtggcaacacccatcccggcggtcacgcttgccgatggccagtcgctcgatggaaagccgatcgacgtcagcgatttcttcagcgacgtcgacggcgatacgctgacctttacggcatccggcctgccgacaggtctgtcgatggacgcgaacggggttatcaccggcaagatcgccgccgacgcgtcgtcgggcggcccgatctatacggtggaagtagtggcgctagacggtcaaggcggcaggttggtgacaaccttcaacctcaccgtcaccaacccggctcccaccgccgtcaacgataccgcgaccaccaccgaggatgtgccgcttctcaacatcgacgtgcttggaaacgataccgaccccgatggcgacgtattgtcgatcgatccggatttcccgccgcaggccggccacggcacggtgaccgtcaacagcgacggaacgttgaactacacgcctgcaaaagatttcaacggcatcgacacggtggtctatcgcgtcaccgacggccaggggggtctcagcaccggcgtgttgacgatcacggtcggcgcccagaatgacgcgcccatcgaaaccccgatcgccgacatggaacgcaacgacggcgacacgatcagcttcgacatttcgagctacttcgccgatcccgagggcggcgtgctgacatacgacgttcagggcctgcctccgggcctgaccttcgatccggtgactggtatcatcagcggccagatcagcgccggcgcctccggcccgatgggcctctccaactacgtggtcaaggtcatcgcgaccgatgacggcggcctcaccgccgaatccgatttcacctacgttatccgcaacatcgcgccggacgcgatgaacgacacggcaagaacgccggaggaccagccagtcgatatcgacgtgctcgccaatgatatcgacacagacggcgatgtcaggagcatcacgctcgtcaacggcgtcaacctgagcgtcggtggcgcggccgtgccgacctccaacggctcggtgcagctcgtgctggtcaacggcgcgcaggtgctgcgcttcacgcctgccgccaactacgccggaaccgcttccttcacctatacgatcagcgacggcaatggcggcagcgatacggcgacggtgacggttacggtcgatcccgtcaacgatgcgcccgtggcgaccccgatccccgatcgcgcgcaggcagatggctcggccgtcagcttcgatgtcaggggcttcttcagcgatgtcgatggcgacacgctggcgatctcggtcaatggcctgccgcccggcctcggcttcgaccccgcgaccggtctcatcagcggcacgctggatgccaatgcatcggcgggcagcccctacaccgtcgtcgttacggccaatgacggccagggcggcgaggtctcgacgcagttcgtcttcaccgtcagcaaccccgcgccgatcgccgccaacgacgcggttcagaccaacgaagacaccgccgtcaccttcaacccgatcaccggcgttggcacggtcggcggcggcgtggatgtcgatcccgacggtgatccgctcacggtcgtggcgatcgacggccagccgatcgtcaccgatggcacggttgccgttgcgggtggcgtcatccgcctcaacgccgatggatcgttgaccttcaccccgacggccgatttcaacggcaccgtgccgctgacctaccgtatcagcgacggcaatggcggcttttcggaagcttcgatcgtcatcaccgtggcgtcggtcaacgatgccggcgtcgtcgatctcaacggtgccggcgctggcgtcgatatcgccgtctcattcaacgagggcgatgtgccggttgcgattgccagcggcgacgcctcggtgttcgatgtcgagaacgggatcacgtcgctgaacgtcgcgcttggcggcttcgccaatgcgggttcggagatcatccacctgaacggcgcggtcgatgtcgtctatgggacggcgagcagcggcacgatcagcttcggcggcacgaccttccgcttcacctacgacggcgccaacgcgctcgccatcaccaacgcggccggcggtaccatgggcaacgcggcgacgagcgccctgctgcgcgccatccagtacgaaaacaggagcgacaacccgtcggcgggcgaccgcaccgtctcgatcaccgtgaccgacgacggcggcgcgacctccgcggccgcggtcgcgacgatctcgatcggagctgtcaacgacgcgccggtcgccgtcgacgacacggcgacaacgaacgaagataccgcgattgtcggcgccgtacccggcgtgctgggcaacgacaccgacgccgatggcgatgtgctcgtcgtctcggccgttggcggcggcgcgcccggcgccgcggttgccggctccaccggcggcagcttcgttatcaacgccgacggcagctaccgtttcgatcccggcgccgatttccagggcctcaaggccggtgaaacacgggtcacctcggtcagctatacggtgtcggacggtgctggcggcgcggcgaacgcgacgctgtcggttaccgtcgtcggcgtcaacgacgcgccggtcggccaggatggcaccattcagaccgccgaggatacggttgcgaccggcttcctgcccgtcgctacggatcccgacggcgatgcgctgacctatgcgatcgccacgccgcccgcgaatggcgtggtcacgatcagcgccgatggcagctatcgctacacgccgccggccaatttcaacggcagcgacagcttcacctacagcgtttccgatggccgctcgacggtcacctacaccatcgccgttacggtgacgccggtcgacgatgcgcccgtgggaacgccgatcgccaatcaggcctactcggacgcgcagaccattcgcctcgatgtctcaggcaatttcagcgatatcgatacgccgagcctgaccttcatcgcgacaggcctgccgacaggtctgtcgatctcgtcgcagggtatcatcaccggaacggtcgatcgcgacgcgtcgcagttcaacggcggcgcctactcggtcaccgtttccgccagcgacggcacgaactccgcgagccagaccttcatcatcacggtctcgaacccggcgcccatcgctcgcgacgatgccgccagcaccggcgagaatgccgatatcgccggctcggttttcgacgataacggcaatggagcggacagcgatccggatggcgatgccttcgtcgtcagtgccgtcaacggcgttgccggcaatgtcggtgcgtcgatcgcggggtcgtcgggcgggcgtttcgtcatcggcaccgatggcagctacaccttcgtgccgggcgcggatttcgacaatctgaaggccggcgaacagcgcacgaccagcgtcacctacaccatctccgacggccagggcggcacgtcgaccgcgaccttcacggtaacggtatcgggggtcaacgatcttcctgtcggttccgatatcgcgatctcgaccgccgaggataccgccttcagcggccagttgccggcggcgaccgacgtggacggcgatccgctgacctatgcggtcggcagtcagccggccaatggcagcgtcaccatcgatccgaccggcgcctacgtctacacgccggcagcggacttcaacggtagcgacagcttcacctacacgatctcggacggcaccgccgtcgtcacgcacacggtgagcgtgaccgtcaacccggtcaacgatgcgccggttctgcaggatgtcgcggtctcgatcaacgaagacggcacggcgaccggccggatcgtggccaccgacatcgacgacgcgccggcgacgctggtctacggccttcagaccgccgcttccggcgggaccgccgtcgtcaaccccgacggcacctacagctacaccccgaatccggatttcaacggcacggacagctttgtcgttatcgtccgcgaccccggcggcgccaccgccacggcaacgatcacgatcacggtcggcgcggtcaacgatccgcctgtggccgtcgacgataccgccgcgaccaccgagaacaccgcgatctccggcaacgtgatcgtcggcgggccgggtgccgacagtgatccggatggcgacacgctgaccgtcgtcggcgtcggcgcggccgccggcaatgtcggcaccgtggtccccggccagggcggcgggagcttcgtgatttccgccgacggctcctatacgttcgaccccggcaccgatttcgacggtctggcagccggtgctaccgcgacgacatcggtgagctacacgatctccgatggcaatggcggcgtctccaccgcgaccctgacggttaccatcaccgggctcaacgacgcgccgaacgcaccgacattgccaccacaggcaagcctcgatggcgccgcgatcgtgctgcctctcggtgctgagttcaccgatgtcgacggcgatccgctgaccttcgatatcaccggattgccgccgggcctcggctacaacacccagaccggcgagatcacgggtaatatcctcccggacgcctccggcgcgaccggcagcgcggtctataacgtcacgatcaccgcaagagacggactcggcggcgaagccgttcgaaccttcgcctggacggtgaccaacccggtgccggatgcggtcaacgatctcttcacgatggacgaaggtggtcagctgaccggctccgttcttgatgccaacgtcaatggcccggataccgaccccgacaatgatccgctcaccgtgaccctggtgacgggtaccgcgcgtggcgcactcgtcctcaatcccgacggcaccttcacctatacgccgaccgcagggttcaacggcaccgacagcttcgtgtatcgcatcgatgacggtaatggcggcaccgacacggcgaccgtcacgataaccatcaatccggtcaacgacgcgcccgtcgtcgtcaacgacagcttcaccgtcgcggaggatggccaggtggtcatcgcggtcttggcgaatgacagcgaccccgatggcgatgcgctgagcataacgcagatcaacggtcagccgatcagcgtcggcggcagtgttaccctcgcatccgggacggtgacgctgaattccgacggcacgctgacattcgcggcggcacccgatttcgccggcaatgccagcttcacctacacggtttccgacggagccttgagtgtgcagggcacggtcaacggcaccgtgacgggcgtcaacgatgcgccggtcaacggcctgccggcgaccttcaatggcaccgaggatacggcgctgccacttgccggcctgtcgatctccgacgtcgatgccggatcaggcccgatgacggtgacgctttcggtcgacgcgggtacgctgacggcggcggccggcggcaacgtggtcgtgaccggcaatggttcgggctcgatagcgctgaccggcacgctcacggatatcaatgcctacctcgccggtgcatcggccccggcctatcatccgctctcgaattccaatgcgccggtgacgctgaccatggtcaccagcgacggcggcaatagcggcgccggtggcgtacagaccgataccgaccgggcgacgatcattctcgcgcccgtcaatgatgcccctgtcgcgaccggttcaatgatccagacgcgggaagacgtcccggtttcgggcgtggtggccgctaccgatgcggatggcgatccgctgacctatgcgatcgccacgggtccacgcaacggcactgccgtcatcgatgcctccggacgctacctctactcgccgaacaccgatttcaacggcagcgacagtttcgacatcagcatcagcgatggacagggcggtgtcacgaccgtgacgatcgcggtgaccgtcacaccggtcaacgatgcgcccgtcggttcggatgcgacggcgacggcggtcgaggaccagacgctgaacggccggttgccggtggcgaccgacgtggatagcgccaacctgacctacgggcttggcgtccaggcggcgcatggcacggtgacggtcaaccctgacggcacctacagctacgtgccgaccgcgaactataatggtgccgacagtttcacctacaccgtctccgatggtcaggcgacctcgacctatactgtctcgatcaccgtgactgcggtcaacgacgcacccgtgagctcgggaacctcgatctctaccgaggaggacgaaacggttaccggccagttgcccccggcttccgacgccgatggcgacccgatcacctacgggctcgccacgcaggcgtccaacggcaccgtggtcatcggtaccaacggcagctacagctacacgccggcacccggctacaacggctccgacagtttcagcttcagcgtatcggatggcaccgcttccacgatctacgtggtcaatgtcaccgtgggggcggtcaatgatccgccgagcggttccaacgccgcgattacagtcgccgaagacagcctcgccagcgggaggctgccactcgcgacggatcctgacggagacgcgctcacctatgggctgggtgcgcctgccgcgcatggcaccgtcaccgtcaacgctgacggcacctacagctatcggccgaatgccaactacaacggcacggacagcttcacctacacggtctccgacggcatcgatcagtcgacctatacggtctcgatcaccgtgacgcctgtgaacgacgccccagtcggatcgaacaccgcaatcacggtatccgaggacgtgcccttcgacggtgtgttgccggccgccagtgatgtggacggcgatccggttcgctatgccgtcggcacccagccgatgcatggctcggtgaccgtcaatcccgacggaacctaccgatacgtgccggcagccgactataacggtgccgacagcttcacctaccaggtgaccgacggccaggcggtctcgacctacacggtcgcgatcacggtgaccgcggtcaacgatgcgccggttggcagcaacgtctcgatcgccgtcgacgaagacggctccgcgtcgggaacgctgccgcgcgcggtggatgtcgatggcgatccgctgacctatctgctgcagaacggtccgagccatggcgtggccaccgtgctctccgacggccgctatacatacgtccccgccgccaatttctctgggactgataccttcacctacgcggtgtccgatggcactgtgctgtccgtctacaccgtgacggtgaatgtcggggctgaaaacgatgcgccgacgggctcggatctggcaatcagcatctccgaggatacgagctttaccggctcgcttccatcagcctccgacgcggatggcgataccatcgtctacggcctcggcacgccggcggcccatggggccgtcaccgtcaatcccgacggcaccttcagctacgtgccgcaggcaaactatgccgggccggaccagttcacctacaccttgttcgatggaaccgtgacggtgacctataccgtgaccatcgacgttcagggcgtgaacgacgcgccgatcggtgcggatacggccatctcgcttgccgaggatacggccttctcaggccagcttccgccggccgtcgatcccgatggcgatcccgtcacctacgctctcgccggcgcggcaagccacgggacggtcagcatcaatgccaacgggacctacagctacatccccgacagcaacttcaacggcaccgacagcttcagctattccgtgagcgacggaacggcgaccaatgtctatcgcgtctcggtcaacgtcagcgccgtcaacgatgcgccgatcgggtccgatacgtcgatttcggcgcagcagggagcggtcgcgaccggcaatctgccaccggcctacgatatagaaggaagcccggtcacctacggactgggtgcgcaggccgcaaacggaaccgtggtgatcagagccgacggcagctactcctatcggcccaacagcggcttcagcggcagcgatcagttcacctacaccgtctcggacggaacggcggtatcgatctacaccgtcacggtctccgtcggtgccgtcaacagcgcgccctcaggtcaggacacgacgctgacggtttcggaggatacgccgttcgcgggccaactgccggtcgcgaccgacgcggatggcgacgcgctgacctacggccttgcctcgggaccggcgcatggcgtcgtgaccgtttcggcggacgggcaatataccttcacgcccgaccgcaatttcaacggcgccgaccagttcagctactcggtcagcgatggccgggcgacggtgatctaccgtgtgttcgtcactgtggcacccgtcaacgacgcgcccgtcggttcggatacagcgatctcgctcgccgaggacacgacgttttccggacggctgccgacggcctccgacgccgatggcgacaccatcacctatggcctggccgccgccgccggcaacggcacggtcacgatcaacgccgatgggacctacagctatacccccaacggcaacttcaacgggaccgatggcttcagctactcggtcagcgacggcacggttaccaacgtctatcgcgtgagcatcaccgtcaccgccgtcaacgatgcgccggtcggctcggatacgtcgatttcggtgcaggaaggaacggtcgcgaccggcaccctgccgccggccttcgacgtggagaattcgccggtcacctatggcctgggcgccaaccccgtccacggcacggtcacgatcgatccgaacggaaactacacctaccagccggacagcgggttcagcggcaccgaccagttcacctatacggtctccggcggcacggcgacctcggtctataccgtgacggtgtccgtcggcgcggcgaacggcgctcctgtcggcagcgatacgacgttgacggttgccgaggataccacggcgaccggtacactgcccgtcgccaccgatccggatggcgatccgctgagctacgcggtcgcggccgggcctgcgcatggcgtcgtcacgatcacggccgacggacggtatagcttcacgccgaacggcaacttcaacggcaccgatcagttcagctattcggtgagcgatggcagggcgacggtcgtctatcgcgtattcgtcaccgtcaccgccgtcaacgacgcgcctgtcgggtccggcaccgcgatcgcggtcggacgcgaccagacggtcaccggcacgttgccgccggccttcgatgtcgagggatcgccgatcacctatcagctgggatccgccccagcccatggcgtcgtgaccgtcaatccggatggaagctacacttacacgccggcggccggctatgaaggagccgacagcttcacgttcacggtgtccgacggcgatgccacgtcgacctacaccgtcgcgatagccgtgggcgccgcggtgccgccgacggagccgccggaaccgccgccgggtgaacgcccgccgctcgagagggacccgccggtcgtgttccccgtcgatccgaacgatccgggtgcgccggtctttgccgacgacacggaggttggtggtgcgtcgaaggagatcatggaagacctcggcgccatatcggacgatatcacggccgacggcccgatcgacgcggtcgtcaacgccgcgcagcccttgaatggtatcggttctctgccgcgccacggcgccgtgctcgatgccgtgcgccagatctccgagtggatcgaaagcgggcgccgtctcgacgacatcaacatcggcttcttcaagggagggtcgaacatacacatcgccggaataggggaagataacacctggttcacggtcgatacgatcttcaacgagaacttcctctacatcctgcccgcctatggtagccagacggacaagacgagcttcagcgtgacgctgtcggatggccgcgcgttgccggactggatgacggttacgcgcggcggcatgatcatcggacgcccacccgtcggcgccgtctcggtcgacatccgcatatggggcacatcgcgtgacggtacggtcagcgacacgctgcgcatcgacctgcagacggggacggttctcgaccatgtcagggaccggcgggccgatcttggcccgggtgcgctgttctccagccagatgctggccgaggcgaacatctatggtgagcaaagcgatcgcctctggagcgcgttgcggggacaatgaggcaggtcgtggcgacaccggcgcggcatctcgcagcgagtgcggcagcggggcgacctcacggcggggcaataagctgtggtcgcagattaaacggacggaaagaaaattgatgtagttgcgttttctgttgtcctgagttccagactagaccatcgatgaacgcaacttggcagatactgctcggaaacctcgccatcaccgcgctggcaatatcgctgtggtcgcacgcctattatcatacgcgagccctgtccgagcgccggcgcaaccaggcgttcggcatcgccatgggcctcggcgcaatctgttcgatgatgctggcggtgccgctggatcaaggcgttttcgtcgatctgcgctatacgctggtggcggtttcggccttgtttggcggcccgttctccgtgctcttgacgatcgtgattgcctccgtgtttcgcctttccgagggtggatcgggtgcgctcgatggcgtgaccagcatgtgcatcgtcggcatggtcgggctctgcggctatctgatcgtgagaaagcgcaaggtcaggctggccgacgcggccattctagggatcgcggtatcggccgcgctgctggtggtcatgtccttgctgacgtcgcaggccaatgcgcgggcggtcgagctcgtcgggttcccgatcaccgtcttgaacttcctcagcatcgtgattgccgccttcgttctcatacagttcgaaagaatggcgcatgaccgcgatatcctgtcggcggcgctgacacagacgcctgactttcactacgtgaagaaccgcgaaggcaaattcgtgatcgtcaacaagaacgttgccgaacaccatcactacccctcgccggccgcgatggtcggcgcctccgacttccagctcgccacgcaacgtcgcgccgagatgctctacgccgaggagcaggccttgatggagagcgggcggtcgcagctggacaagatcgaatatctgaccgaaaacggccaggagcgttgctattcgacatcgaaggtgccgcttcgcgaccggacgggcactgtcatcgggcttgcgggcgcgacgcgggatgtgaccgaggaaagaaagatcgagcaggaattgcgcgagagcaaggatctgctttcacttgccatggccgggatgtcggatggcttcgccatgttcgaccgtgccggcacgctggtcttcagcaacacgcaatatgcctcgctctttccgctgtcgggcgaggtccgcgtgccgggaacgaatatcagggacatcctcaagaaagtcgtggaatcgaacgagcggcgggattttcgccaggatgtcaccgatgaatggctgtcggaagcatccgccgcgttgtttttcgacaaggatgagcacatcgaactccatgacgggcgttggctcagcctgcgcacgcgcgtcgccgacaacggcatggcgcttgtcgcggtgtcggacatcacgacgatgaagcaggccgaattcgcgctcagaacggtcgccgagcagatgaaaagcctcgccgagaccgacgccctgacgggcctgctcaaccgccgggctttcgaccatgcgatatcagtcgcggtcgagcgaagccgcctggagcgccggccgatggcggtgctgatgatcgacgtcgatcgcttcaaggcctacaacgacacctatggccacccggaaggcgacgagtgcctgaaggcgatcgccgattgcctgcgccgcacgatgaaccgccctcaggacgtgctggcgcggtttggcggcgaggaattcgtggttctgctgcccgacaccgatgagaccaaggcgctggcgctggcggagcaattccgccaaacgttgcttgcgcgggcgatcgctcacgccggcagcgaatatggcgtggtgacggccagcatcggcatcgcggccaaatccaactggaagcagccgatgcgggcctcggaactggtgctcgaggccgatcagggtctctaccaggcgaagcgcgacgggcgcaaccaggcagtgctctggaacccgcaaaggaccagcaggacggcgcgataggcgttgcgatgacggccgcggcctcgcccgcatatcgccccggcaaagaaaaaggccggggcgaaaccgcaccgaccttcctcgacccgtctcgacaacaactgccagtacctccgtggtcagctgtcagagacgaattatgtaagttgagtgtaacgcaacttctgggaagttcaagcgccatttatggggtcgtttcgggcgcgatctacctatttcggtcagcctgaaacgatggcggacaaccgatcgagatcgacgagctttacttcaagcgggaccggatcagtctgggcggcacgaaaccactcggccgcctcgcgcacccggtcgccgtgcggcttgggataggcgccgagccggatgacccattccctgaccgtttcgcgctccatgcggcccgccagatagcgtgcatgaacggtctttgcggaggcgacgagatcggagacgctgttcaagaattgtcctcaatttggcgggtgggttcaacatcgcgcggttgcgcgtatcgaactcagacctcttccttctttttgaccttcaccttcggctccgccggcgcatcgggcgtgggcgcaagcagcttgcgcagcgatgagatcttgtccttgaccagcggacgaaagcgcgtggcgcgaaacggcatgtcggcggctccatagccctctggaccatcatcgttgccgcgatgcagctcctccagcttcacgccgaagaaggtgccgtcgatgtagtgcgtgtattcgccgacccagcgcagcgtgtagatctcgcccttgcgaataccctgatcgatgctgacatgcttgaacctgtcgtcgatgcacacgaccttctggccgacatgaaagtcgtagctcatctctcaaacctcaacttcaaccaccggcaccgggaggtgcgtcgttcttcatgaattcgggatattgaacaacttccgcctcgaccgtgtcgaacgacctggtcgtcggccgcgtcagccgtacgcccggcccgcccgcgataagctctccgtcggcttcgaagatgatacccgaagcttcgagcgccagcctgacagcgttcattgccgtgccggcgccttcggccccatgctcgatacggtcgagatcggccaaggagataccggcggcatgggccagttcggcttgctggagcccgagcatcgcgcgggcgccacggatctgtgcggttgttatcatgatgattttatataaccgtatcgatctttttctcaagctgaagcgtctggtcgatgacgcgatcgtcgaggtcgaaaatattgttcgccacggcaaatccgaccataggagcggcgctcaatgcctccgacgagaccggccttgccgttggcgccatctcggcgaagatcattgccgaagcaaatatccgcatggatggcgcatttgtgatcgattaatcgtctttctgcccgtcagccgccttgaggcttaagcagctaaagccattataagggaagaaatttcagtagaagggaaagagttttggtcggtaagcttgtgacaagacgaatggcggtctttggaggcatcgggtttggtatctcggtccttggaggctgttcagctaccggcgatgtgcagccggagccggcggccatgcctgtgaggacgtcgtcactggacattacctatggtccgaggccggatgagcaattcccgctgccggccattccgtaccaaaaggtcgcctcgcgttttcaccgtcagatcgtcccgaatcccaccagcgagcgtcctggtatcataatcgtggataccgaaaattactttctgtacctcactcaggaaaatgggatggctctgcgctatggggtgggtcttggccggcaaggctttgaatggcaaggccgaggcagaattcagtataagcgccaatggccaagatggacgccgcctgatgaaatggtcgcgcgtcagccggagcttcaaccatacagcattgcgaatggcggaatgccgcccggtctggataaccctcttggagcccgtgcgctttatatctttcaggacggcaaagatacgctgtacagaatacacggctcgccggaatggtggaccattggcaaatcggtttcctccggttgcgtgcggatgatcaatcaagacgtggtcgacctgtataatcgggtgcctgatgggacgccgatcctagtcacgcgtattgcaaaagatggcgttgcaacgctttaggtcgatcgacagaggcgccgctgccgataggcggccttgccgattctggagttccgacaagatcgagatcctgcgagaaaagccgcttttaaggggcggctttcatggctatgaacgaatttttcgggcgtgacgccggatatcatgtcattgctccggttgtgctgcgaacgacaagatgggtctcgagcacatacctcacatcgcggatcgcgcctgattgcagaagatcaaggagcagcgaaaccgcaactcgacccgcttctcgcgaacggtttgagaccgaggtcaacgcgggataggtgaccgcgcccaacacgtcgtcgcagccgatgaggctgaagtcacccggcacggaaacacgcctctctgcgaggccggccagaaccccttgcgctgtcacatcatcgaaggcgaccgcggctgtcgcacccgtggacaggatcgcgtcgaccgcattgcggccggaattgtagctgggcaagctcgcggccacgatttccacggcgatgcctgccgaagcggccgcggtgcgtatcgcgtttcgccgctgcttgtttgaccacgacgtctgtgggccgctgacatagacgatcttgcgatggccgagctttgccaggtgctcgaccgcgccccgcacgccggagccactgtcgatgagaacacgcggaattccatcgatgtcgcgattgatcagcacgagcggcagttgtgctgcatgggcccggatgcgttcgtcggaaagccgtgaggaggcaaggaccaatccctcgacttgtccggcgaaacggccgacaagcttgtcttcctgttttgggctttcttccgtattgccgagaaagatacagaagtccgatcgatccgcctccatctgtgccgcctggatcaatggcgggaagaacgggttggcgatgtctggcacgatcaggcctacattgccgtggcgaccggtgctgagggcgcgggcagtgtggttgggtacgtaaccaagagcctcggccgccttcatgatgcgatcgacggtctccggcaaaagcatatccggcttcgtgaaagcgcgcgatacgctcgaacgcgccacgccggctgcatcggcaacctggctaatggtaacgcccttggcccgttttatcatgatgcgcagaaaccctcgtgctccggcttcgattaccaccaagtccggtgccttatcaatcgatgcatcacagtggcacacgggtgcttgacatgcaaccggttgcatgaaactcttctgacgatcggaacagggaatgagacatgacgcgagagtgcataatgcctttcgtgccgacattcgctccgcgcccagatatggagacccattgatgcccgccactcttgcccggcacccactgcccaaaatccgtcgaaccttcgaccggctggcggtccagagtttcagttcgcgcgccgacatgggcactgccgccgcggccgagatagcggcggcacttggcgattgtctctccaggcaatccagcgtgcggatggtctttgcggctgcgccaagccaggccgacatgctcgcggcactcgctgccacgccggggcttgactggcaccgggtaacggcattccatatggatgaatacatcggccttgatccagcatcgccggcccgtttcgccaactggctcgatgctcacatgtttacgcggctcccttttgctgccgtacatcacatgagacccgagccgagcgccgaggcggaagctgtccgctatgcggcactgatgaacgaagcgccgatcgatcttgtctgccttgggattggggtgaacggccatatcgctttcaacgatccgccggtcgccgatttcaacgatccgcatgatgtcaaggtcgtcgagctcgatgatgtctgccgccagcagcaggtggatgatgattgcttccccgatcttgcatcggttcccactcaagcgattacgctcacggtgccccgtctgatgcgcgctggacgccttttctgtgtggtgccgggggcgatcaagcgcgatgccgtgtcgaaggctcttcacggcccgatcagcacccaatgcccggccagcatcctgcgccatcacgaggccgccaccctctatatcgacggagactccgaccccgatgcgtgagaaaggtccaatcgataccaatgcactttgcgaggcctatcttgcctcgacgcacggactgatgcgccggatcctcgatgaggaaacggtgccgctcgaacgtgccgcggagaaacttgcagagcagattgccgccgaccgtctggtctatatctatggtcctggcggccattcgaacctggcgtcccaggaggtctttttccgcgccggcggcctcatgcatatcagcgccattctcgacgaaggtacgctgctttccaatggcgccttgcgttccatggcaatcgagcgaacgcccggctacgggaggatcgtcatcgagaaccagggcttgaaggaaacggatatcctgatcctggtaaacgcctacgggatcaacgctgccgtcattgatgcagcgatagaagcgcgccgttgcggcgtcttccttattggtgtcagctcgcgccagcatgccgagcataccgcgcccgaccatccggcgcgtcatcccaccaaacagaacctgcacgacgtcgtcgatatcgcgatagactgcaaggtgccaattggcgacgctgtcgtctcgatagaaggcatgggagaaaatatcgccgcgatctccaccttcgccaatgccttcagcctgaactgcctggtggtccgcaccgtcgccaagcttgtcgagcgtgggattgaaccacccgtgtggcgcagcggcaatgcaccgggtggcgatgaggcgaacggccggtttatcgccaacttccgcggacgggtgaaggcactctgatgacgatcgtcgacggcatcgatcctgcaaccggcaaaggcatctcgatcgagatcgccgacggcgtgattgccgccatacggtcagccgacggcaagaacgccagctatatctccgcgggcctgatcgacctgcaggtcaacggctttcgcggcctcgatctcaattccggcaagctaacgtcgaataccttgctgtcgctctgcgaggagttgctaagcgttggcgtcaccagctggctgccgacattgattaccgcttccgaaagctcgctcctgtcggctctggagacgatcgccaacagtcgatgcgaccacaggctgatcgaggaaatggtggcgggcctgcatatcgaagggccatcgatttccggtgaggatggtccgcggggcgcgcatccgcttgcccatgttcgagcgccttcgatcgccgaattcgaacgctggcagaaggtctcgggcggcctcgtcaagatggtgacactggcgccggaacatgacggcacccttgactatatccgtttcctgagtgcgcatggcgttgtcgtcgcgcttggccacaccgccgcgacgccggcggaaattcacagcgcggctgaagctggcgcgacggtgtccacgcatctcggcaacggcgcctccgcgatgctggcgcgtcatcccaatttcatctgggcgcagcttgccgacgatcgcctgaccgcaacgctgattgccgatggttggcatcttcccgccgatgcattcaaggcgatgttgcgcgccaagggcatcgagcgaaccattctcgtctccgatatggtcgcgcttgccggcatgccagccgggctttacgagcaggccgtgggaggcagtgtcgaggtctcctcggaagggcgtatcagcattgccggcacgccatatcttgccggtgcgagcctgccgctttgcgccaatgttgcgatcgcgaccgccatggcggaaataccgctcgccgtcgcccttcggctcgccaccgaaaatccaggtcgcttgctcggcgggcgcggacgactggaagtaggcgcgcgcgccgatcttgtccgttttgactgggctgaaggtgcgcacgccctggagatccgcgaaacctgggtgcgtggcgaaaagaggtttcagcgatgatccaagcgggggccgcaattgtcgacatcacgccgacgcctggtctggcaatgtccggtttcgccgcacggaacctccccgccgaaggcgtgcacgatgccttgagcgtgcgtgccgtcgtggtcggagagaccgccatcgtcgttgcggatgtcatcggcatcgatgctgcgatgagcgctcgcgtccggtcgcgctgtgtgcttccggccgacaatgtcgtcgtcgcggcgcttcacacgcatggcggcccggtatccatggtgggtcgccttggcatggtcgccgaccctgcctatctcgagcggctggaagacgcctgtgttgccgcgatcgacaaggccgcagccctgcgtcagcccgcaaacctgacagcggggcagggtaacgaccccgggatcgcgcgaaacaggcgccatcccggcggacccgtggacgcatccttgcctgtgctgcgcattcgcgacgaggacggccagatgatcgcggtcgtgacagcctatgcctgccatccggtcgttctggcagccgacaatcgcctatggacggccgactatccctgctatcttcgcaaggcacttgaagcggcgtatcccggcgccatcgcgcttttcatgacaggatgtgctggggacgccaataccggccactccgcttatgcttcgctggtgctttcggcaaacccggagcgtacgttcgcgaccgccgagcgcatcggccggcatgtggcaaggacggctctcgacgcggccgagcatgccatcagcggccaggcgagagcccgaaacgcagatgtcgcgcttggctttcatcgcagggaagtcgagcacccggacacgctcgaagaccattggcgccacgaagcgctcaccgccgatcccgcgcgtcagagcctgctcggttattgggccagatgggcaagagatatcgcccccacccagccgacacctctgatggcccgggtaacgatgctcgattggtgtggcgtgccgatcatcgcgctccctggagagatatttgccgaaacggcgctgactatccgtagcgcggtcgatgatggcaaacctgctttcgtcatctgcttcgcggacgacaatcctggctacatcccgccaacaagcgaatttccgtttggtggttacgaggtggatgaggcgcatcggtattacggcttgccaatgtcgttcgcacctggggcagcggaagcgcttgcttcctcggctatcggacttctgaccgccctctgaaggagaacggcgcgatgcaaacgcgcagcctcggacgtcatccggcgcttgacacgcaaccggttgcatgagagttttttgtgaacaacaacaagggaacaggcaaatgaaaaacacatcagcgaagactggaatttcaacgagggcattgcttggcggtgcggccttcgccgcgatgcttgcctccagcgtgaccatggcttccgccgatacgctgacgatctggagcggctatccggaaatggcgccattctatcagcatgtcgcggatgggatgaaagccagccatcccgatctcgatgtaaaagtcgaggcgatcgcgcttcgcgaacatgaaaagcgcgtggcgctcggcctcacgggcggaggtcaggaaggcgcgaccgtcattgagctttcggggtcgactgcaacccgttatctggaaaacgatctgcttcccgaagcgcccgaggacatgtccgccttcgtcaaggacgcgaagaatttcgatccattcttctccgatattgccagctacaacggcaagatctacggcgttccactgtttcgcggacaaggctcgctcttctacaacaccgacatgttcgaggccgccggcctgaaggccccgccgaagaccacggaagaatacaacgaatatgccaagaagttgacccagcgcgatagctccggcaagccgacggtatccggctggagcctgcgtctgtccggcggggggcagggtatagcggaaaagttctggaccaatatgcatcagttcggtggcgcaattctcgttccggccggcgacggaaaatggaagacgaatttcgccaacgaggccggccgcaacgccttgaagcaatatttgcagcttatctttacggacaatacggtaacgccggagatgcctgccgatgccgacgccttcgagcgcggccagaccgccatgtttatccgcgaatcctgggttatcggtgatatcgccaagaaagcgccgaacctgaaatatgcgactgccccgttgccaaccggctccatcgcactgccgaccaacctttatgtcgttggtgaaggggatggcgccaagctcggctgggagtttgcaaaggctgccaactcgccggaaaaccttgtctggctgctgcagaatgttggttggctgccgaaccgtgccggcgtcgattattcgtcggtgacatcgaaacagccagcctttgccgctttcgtcgactacccgcaaggctacaaattcttcacgctgccgtcgatcgcaccgatcgaagagatcctgacacgtgtcgcggcccagcttaccgtcgccttcgcggatccctcgcttgcgaccgatgacgccaaaatcgatgccttcctgaagaaggccagcgatgaagtcgataccatcctcgatcgcgaaggcctgctcgcgaaatagtgccggctatctcctaaatccgatgtgcctggggcgatactgttatggtcgccccgggcattctccagggataagggctcgccccagggcggatgaacccatacgtctacaggtcaaacgcatgctgaagcgcaaaaggtttctctttgcgatcctcgcaatcctgccgacactggcgatcttcgcctatgtaaggctctatccgatcattgatacgttgaggctcagcctctttcaatggaacatcctgtcgaagaacaagcctttcgtcggcctcgcgaattttcgggagttgatgggcgatcaactgttcctggatgcacttgtcaacacgacgatcatcgcgttcggcgtgctcttcttgacgattccgatggcgctcgtcattgccgcgttgatctatcacaggacgcgatcaagaatggccggtttctacgagaccgccgttttcattccacacgtcgtgtcgctggtgccggccgcgatggcctggaaatggatttttgacgctcgcctcggtccgctgaacgcgcttctgaccttctttggaattcccgctcagaactggttgttcgatccggtgctgtcggtgatctgcatcatcattctctgctcctggcaggcgctgggttatgcggtgctaatctatctcgtcggtttcaagaaccttcctgtctcgctttacgaagccgccaagctcgacggtgcctctggcccgcagagcttctggcacctgtcgatcccgatgctcaagccgatcaccctctatgtgtccgtcgtcacactggtttcgggcttcaacgtctatgcgcaggccttcgttctggcatcggattcgcaaggcgctcccggacgtcaggttcgtgtcctcgttctcgacatgctggaaaacagcttccgcaattaccgcgtcggctatgcggcgtccgaagccgtcgtgcttttggtcatcgtgctcggcttgacgctcatacagttttccatgctgcgggaaagggggaaggcatgaatcgtcactatgcaggtcccagcgaccgcaccgtcgaagaagtcgcggagggcgccagcctgcgccgcaagaagcggctgaccaatctcgcgatcgatatctttctgctgatcacttcgatcttcatgcttctaccgctcgtctttctggtggcgaatgccttcaagacgccggccgagatgctcgcctggccgccgacgatcattccgcgcgatccgacgatcgccaatttctccgccgtgttgggagatacgcctctcctgcgctggatcggcaatagccttgctttcgcggtgctgtcgaccattgccatcgtcgccacctcggcgattgccggctatgtcttcggaaaattccgcttcggcacgatgaatgtgctgttcgcgctgttcctcgcgaccgcgatcgtgccgttcgaagtctacatgatcccgctttacttccaggcaaaaagtctcggaatcctcaactccgtctggggcctgttgcttggctatctggtcatgagtttcggcattttcctgatccgtcagaatgtcatccacaccattcccgatgagttgctggaagccgcccgcatcgatggggcaggtgagttctggatattcctgcatatcgtgctgccgctattgcgcggtgcgcttggcgcattggccgtccttgccttcttccaggcctggacggccttcgcctggccgatcatcgtcgccacgacgcgctccagctatacgatcgaggtgggcctggcgttgttccagactggttttacggtcgatcttggtcgacttagcgccgcctccgccaccgtgctcattccttcaattctgctgttcgtcatcctgcgtcgcaatttcgtgcagggcgtcgccagcacgggcatgaaggaatgacggagatgacgtttttcgaagaggcccgccgcacctatgtcgcggcgaatgccgccacgctttactggatgctgcagcggccgatgcttggcggtggatttctaaataccaagcagaacagcctgacattggccgactatggctccgacgacggcattcgcggaccggattacacctatggctggatccagggcagggggctcgaagcactcgttgcccatgcggagttcttcgaagaggagttgccgccgctcgccgaaaagctggatgcggccggccgtcgcctctacgacctgctggccgagttgcagaaggcggatggccacgcctatttctgctacgacaagcacatgaacgccgtttatgccgatcagcaaaatcgccttcatgcgcaggaaaagccggcgctgatctattcctattcggacgctttcgtcgccaaggggttggtttcggcggcgagccgctacgggttgtcaggcctcgccgatcatctggcctatttcgatcgcgttgtcgcgtcggtcgaggccggccgcttccagatggatgagcggcgtccattgtcgcagcagtgccttggtgaacaggcggacgacatcgggcctcgcatgatcctgctcggcgctgccggaatgttgaagcgtttcgggcataccgcgcataccgcctatgccgatcggttcattacccatgtcatcgacaggcatttcgataccccttccgctctgctgcgcaatgtaccgggcgaggacgcctgcaatgtcggtcatggtatcgagttcgtcggcttcgcgctggattatctcgacgacgatgccgatccgacactgatcgagacgctggagcgcattcttgtcgcatcgtttgacaaggggttcattgggccgggtctgacactgacaatttcgattgcaagtggtgaggcacagggccgctattgtccctggtggtcgctgccggaaacgatccgttccgcagcgcttgtccacggcaggaccggcaacccgcagagcctgcgggtatggaaggccgcgcatgccgcctttttcgaacgctactggcgcgggacgccaccgattgcctatcagacgatggcaaagggcgaagagggagatgtccccgtggacttcgttccagccacgcccgatctcgaccccggatatcacaccggcctcagcctgcttgcggccattcatgccgcggatcgcttggcgccgacccctcgaatttcaggataaaatcatggcttccgttgaaatccagaatgtccgcaaggcttatggcgacttcgaaactatcaagggcgtttcggtcgaagttccggatggcgccttcgtcgtgcttgtcggcccgtccggttgcggcaagtccacgctgctgcgaatgatcgccgggcttgaggagattaccggtggcgcgatccgtatcgatggccgcgtcatcaatgatgttgagccgaagaaccgcgatatcgccatggtcttccagaactacgcgctctatccgcatatgacgatcgcggaaaatatgggcttctcgctgcgtctggccaagaaatcgaaggaagagatcgcccagcgcgtcggcgacgccgcccgtattcttggcctgtcggaatatctggagcgttatcccaagcagctttccggcggccagcgccagcgcgtcgccatgggccgcgccatcgtccgcaacccgaaagtgttcctgttcgacgagccgctgtccaacctcgatgccaagctgcgtgtgcaaatgcgcgctgaattgaaggacattcacgcccgtatcaagacgacgacggtttatgtcacccatgaccagatcgaggcgatgacgatggctgatcggatagtggtgatgaaggacggactggtcgagcagatcggtgcgccgctcgatctctacgaccgtcccgtgaatacgtttgttgctagctttatcggttcgccgtcgatgaatttcctgaccggaacggtcgccgaggatggcagggcggtgatgacggaaaacggcataaggttgccactcgcatcagtgtccggcgcggcacccggcatggcggtgacctatggtatccgtcccgagcacctgacgatcgcggcagcaagcggcgaggttatcccgatgcttgtctccaatatcgagccgaccggctcggagactttcgtgcagggcactgtcgacggtcaaaagatgtctgcccagttgcgcgagcggatttttatcaagacgggtgaagtgttgaacctgtcgctgtcaccggcgaatgcgcatctctttgatgtgggaagcggcaagcgggtcgagggatgagcgcgcctctctcagacgcgacgctcgggagcatcgacccacgcgtcgagcagccgggctacgatcgctccatcgttacccctggcatcgtgcacctgggaatcggcgcctttcatcgtgcccatcaagccgcgtttaccgatgattgtctatgggatggcgagagtcattggggaattataggtgtctcgctgcgcagccgcgacacccgcgatgcgttgaaaaagcaggattgcctttacacgctcgcgatacgggacggcgatcgccagcaattgcgcgtcattggctctgtctgcgatattctcgtggttcccgagaatccggcccttgtgctggaggtgatgtcgtcgccggatattcgtatcgtcagcctcacggtgaccgaaaaggcctatttccgcaatgccgccggcgatctcgatttcggccatcgagatattcttgccgatctcgccgatccgcgacgaccgcgcacgattttcggcttgatcgtcggtgccatcgaacaacggcggttgcggcgcataaagccatttacggtgatgagctgcgacaacctcgctgccaatggccgcaccttgcatcgactgcttgtccagtttgcgacgaggcggtcggaggagctggcggactttatccgcgaccacgtttcctgcccctcgaccatggtggacaggatcgttccggcaacgaccgcactggatcgttccgaagttggggctttgcttggcgccgaagacgcgtggccggtggcctgcgaacccttttcccaatgggtgatcgaagatgattttccatcggggcggccatcctgggaacatcacggcgcaactttcgtcaacgatgtcgaaccatttgagctcatgaagttgcgcttgctgaacggtgctcattgcgccatcgcctatctcgggcaattgctgcgccacgaaaccgttgctgactcattttccgatcctcgcgttgcccggttcgtccgcgcactctggcgtgaactgataccgaccttgcagcagggcgcgggcttgaagccagccgcctacgttgaggatctggccctgcggttcggcaatagcgcgctgaagcatcgcaccgcgcagatcgccaatgatggctcgcaaaagctaccgcaacggatcgtggcggccgcaatggagcgcctggatcgcggcgaaccggtcgatcacctggcattcgtcgttgcggcctggatcgccgcgctgctctcccgtcagcccgatacattcaccgatgctctcgatccgcagtttgtgcatcttgatccgtcgtcgaacatagtcgaacagatattcacgatagcaggcttcgcctccggtgacccgcaccgcatcccattcgcaaaacaagtggccacgcagcttgcccgcatcgacgaaagtggtgttgcggcggctctcggcgcattgaacggaaaggcatgagaatatgaagcagacctggcgctggttcggacccgacgacaccgtagccctggaccatgtgaagcaggcgggcgcgaccggtatcgtgaccgctctccaccatctgaacgatgggcgggcctggccggaagacgaggtcttcaagcgcaaggcgatcatcgaggacaaaggcctgacctggtcggtggtggaaagcatcatcgtgcacgaggatatcaagacgcggaccgggcgttacagggagttgctcgacaactacaaacagtcgattcgcgccgtttccagagccggtatcaagaccgtctgctacaacttcatggccatcaccgactggacccgtaccgatctcgactaccccatgccgcatggcggcacggcgctccgcttcgatgtggtggagttttgcgcttatgacgtcttcatgctgaagcggccgggcgcggagggggatcaccccgccgatcgggtcgagcgagcagccacctggttgagggccgccagcgaaacggatcttgcaagactggagcgcaacctcatcgaatgggttccggcccgcgaatttgtctatgacagacagagcctaaaccgcatgctggacgtttataacgagcttgccgaagacggactgcgcgccaacctctccgctttcctgcaggagatcatccccgttgcggaggaggaaaatgtgaggatggcgatccacccggacgatccgccattcccgctgtttggcttgccgcgcgtggtctgccaggcatccgacgcgcgcgcgctcctcgcggcggtgccgtctccatccaacggtatcacgctttgcaccggctcctatggcgccaatccggataacgatctggtggcgatggcaaaggaattcgcgcccgatatccacttcgcgcacttgcgcaacgtcaccaaggagggcgacggttccttccatgaggctgagcatctggagggcgacacggatatggtgcgggtgacgatggcgctcatggccgaggaaaagcgcaggcgggcgagcgggcgggctgactgggaaatcccgatgcgtcccgaccacggccacgccatcgtcgatgacatcggcaagcgggtgaacccaggctattcatgcatcgggcgattgaaggggcttgccgaactgcgaggcattatgagaacggtcgatacgctgaacctggcctgaccgacaggagtgcaataaagtgagcaagctccgggtagcaattattggtcttggcatggcggcaggccaccacgcccgcgccgtgcttgcgcttgcgcaccgggtcgaatgcgtagccgcctatagtccgacggccggtcggcggcaggctttttcggcggaattcggtatccccactgtcggcggacccgatgagatattcgaagatcccagcatacgcgcggtccttatcctgacgccgcccaacacccacctggaactcgttcgccgcgcaaccgaggcccgcaagcacatcttgctggaaaagccgctcgacgtatcgcttgagcgggccgaagcgatcgtatccttggcgcgagacgctaagctgctgctcggcatggtccttcagaaccgttttcgtccgggtgcaatgaaactcgacgagatcgtcaaatccggccgtctcggtgaactggtcgaggcgtcggcagcgttgcgcaactggcgaccgcagagctattacgatgaggcgggccgaggcacgtgggctcgagacggtggcggggtgctcttgacccaggcgatacatgtgatcgacttgctgctgagctacgcgggaaccccggtcgacgttgtgtcctacgttcgcaccacccctgttcacagaatggaaactgaagatttggtcgcagccgtcttttccttcgaaagcggtgcgatagggtcgctgaatgcgacaacggcggcatatcccggctttcccgagcgaattgaactgatcggcacgaaaggcacggcaatcctgtctggcgagaggctggacgtttccttcgcagatggaacaagtgagagagtgattggtggaaacacgagtggcggcgctggtgcgaatccgatggcttttggtcatgagagccatctcgcgctgatcgagaatttcgtggatgcgatcgagaccggttctccgttgcgggtaacaggcgaagatgccttgaaaactcacaggtttatcgatgcaatcctgaccgcgggtcggacgtagcaaaggtggcctcccgcctctctgccatttggcagtcgaatgcaagaacgcggtcgttgttgcccccgctggctttcatagacaatcctattgggcgagataaagctcgtttcgagcattccggcctttcggcaccgtttggtgacgaccatgacgtcagcgcgcgcagtggtaatggtcagcttcaattcgttcgatagaacggttgggcgaacgggctgggctttcgccagcccttgatagcttcggcagtccgactgcatcaacaaagctaggttatcggccagaaatacgcaccttagcgtgtcgcgcagggtctgcgacggcggccataactcgcgtctcggaagaattgtgttttatgaatgcactgaatgtgtacatgaagtacacaattacttgacggccctcgatctctatgagatgctcctgttcatagcacctggaagctcggagttatgcgatggcaaagaccgttaagagcagcctctacgaggatctgaagcgtcagatcctgacgatggagcttgatccggacacggatctcgacgagatgtcgctgagcgaacgctacggcctgtctcgcaccccggttcgcgatatctttcggcggctggcgggcgagggttatatcgatatccgcgagaaccgcggcgcccgcgtcattccgatgaaccatacgacgcttcgcaacttctttcaggtggccccgatggtctatgccgcgatcggccggctggcggtgcagaatttcaagccggcgcaacttgtcgacctgagggaaacgcaggagcggttccgcaaggccagtggcgatcaggacgcgctcggcatggttctgcagaacaaccgcttccacgagatcttcggcgaaatgtccgccaatgcctatttgcagccgagcctcggccgccttctcatcgatcacgcccgcatcggccatacgttcttccggcctcgcagcgaggacatgaagcgccgcctgcaactggcggtcgagcatcacgacggcttcatcgaggcgctcggcagtcacgacgaaaacgcggtcgtcgatcttgtcttcgagcactgggagctctcacgcgagaacatggagatgttcattgcgccacacggcatcaagtcggatgccatccttggcggtccgaccacgcaatcactggagaagtcatcgtgaagtttgaggggatctacacgccggcgataacgccgctcgacgagagcgggcaaatcgaccggaaagcattcgccgcggtcctggaatcgctgatcgaggccaaggtgcacggcatcatcgtcggcggctcgaccggtgaatattacgcccagaccaaccaggaacggttcgatctcgcggcctacgccaaggaagtcatcggcaatcgcctgccgctgatcgtcggcaccggcgcgacgcgcacggaagactccgtcgaatacgccaaggccgccaaggagatcggcgccgacgcgatcctggtctcgacgccgccctacgcgctgccgaccgaaagggaaaacgcggttcacgcgctgaccgtcgatcgcgccgcgaacatgccgatcatgctctacaattaccctgcgcgcatgggcgtgatgatgggcgaggagtatttctcgcgcgtcggcaagtccaagaatgtcgtcgcgatcaaggaaagctccggcgagatggccaacctccatctgctggctcgcaagtttccgcatatcgcgctctcctgcggttgggatgatcaggcgctggagttctttgcctggggcgcgcgcagctgggtctgcgctggttcgaacttcctgccgaaggagcacgtcgcgctctatgaggcatgcgtcatcgagaagaatttcgacaagggacgcgcgatcatgtctgcgatgctgccgctgatggactttctcgaatgcggcaagttcgtgcagtcgatcaagcatggctgcgagatcatcggcctcaaggccggctcggttcgcgcgccgctgcgtccactcaactccgacgaaaaaagaacactcgagaccgttgtcgccactctgaagcgcacggtcggaaagatcacctcgggagccaatcgtcatgcatgagccattgaccgccgccgaatacaaggcgatcgccgccgatctccagtttccgacgaacgccttcatcgatggcacgttcaagccggcgagttccggaaagaccttcaagaccaagaacccggcaaccggcgagacacttgcgaaggtcgcggcgtgcgacagcacggatgtcgatttcgctgtcctgaaggcgcgcgaagccttcgatgacgggcgctggcgcctgcagcatccggccgaacgcaaggccgtcctcctcaagctcgcaaagctcatcgaacggaaccgtcacgaactggcggtcatggagagcctcgatagcggcaagcctgtacgcgagtgccagacggttgacgtccccgataccattcatacgctgcgctggcatgccgagctgatcgacaagctctacgacaacaccgcaccggccggctccaacgcgctgacgatgatcgtgcgtgaaccgatcggcgtcgtcggatgcgtcctgccctggaatttcccgctgctgatgctcgcctggaagatcggcccggcattggccgccggttgctcggtggtcgtcaagccggccgaggacacgacgctgacgacgcttcgggtcgccgaactcgcgcatgaagccggcattcctgccggtgtcttcaatgtcgtgaccggtagcggcaaggatgtgggcgagcctctcggccttcatatggatgtcgacatggtcgccttcacgggctccacgcccaccggccgccgcttcctgcgttacgccgccgattccaacctcaagaaggtcgtgctcgaatgcggcggcaagaacccggccgtcgtgctcgacgatgccgaggatctcgacctcgtcgcagaacaggtcgtcaacggcgccttctggaacatgggcgagaattgctcggcgacctcgcgcctgatcgttcactcgaaggtgaaggacgatctcctcaagcgcatcggcgcctatctcagggaatggaagaccggcgacccgctcgatccggagaaccgtatcggtgctctcgtcaacaaggcgcacttcgacaaggtgacgtcattcctcgacgacgccaagaaggaaaagctctccgtcgcccatggcggcgtaacgcagagcggcgccttcgtggagccgaccgtcgttgacggcgtcacgcccaagagccggctgttccaggaggaaatcttcggaccgatcctgtcggtaacgacgttcaacacgctttccgaggcgatcgcgcttgccaacgataccaattacggcctgacggcttcggtctataccgggagcctgcgcaacgccatcaagctctcgcgcgaaatccgtgccggtgtcgttaccgtcaattgcttcggggaaggcgacgcgagcacgccgttcggcggctacaaggaatctggcttcggcggtcgcgacaagtcggtcttcgctcacgacaattactgcgaactcaagacgatctggatcgacgtctccgagcgctccgtggacgagacgatcagatgacaacaggatccgtgaggcgtctgccggtcgagaatggcgtctccggttgggaggcgatcagcgagcgccggttcccgcttagaaagctcgagggtgccgcatccgccgactggctggttgtcggcgcgggcttcgccggtctgtcggcggcgcggcgcctgcaggcgcttcgccccggcgaaaagatcgtgctcctggatgcgggtgaaatcgggaagggaacctcgggtcgcaactcgggcttcatgatcgacgtcccgcataatctttcggcaggcgagtattccagcggcggagccgaggcgacgcaggtcgagatggcccagaaccgcttcgccatcggcttcgcgcgggatgcggcgcaggaatacggcatgtcgcgggagacgttcgatccggccggcaagatcaatgccgcggcgacggcgcgcggaatgaagctgaaccagagcttcgggcagtcgctgaaggcggccggcgagaagcacctgtttctggatgccaacgagatgcgggagcttaccggttccgactattatctcgggggcctctacacacccggcaccgtgctgctccaaccggcggactatgtccgccagttcgccgccggtctctcgggcaagatcgatatctttgaacgctcgccggttacctcgctgacgcgtcgcgatggacggtggaccgccgtcagcccatccggatcggtgaccgccgcgaaggtgatcctgggcgtgaatggccatatcgacgatttcggccacttcggcggccggctcatgcatatcttcgcctacgcttcgatgacctcgggctttccggcggacgaattcggcgcttcggtctcgggcaaggatcgctgggcgctgctgcccgccgatgccatgggcgcgacgatccgaaagatcacgaccaacggtgtctcccgcatcgtcatccgcacgaagtacacctacgagacgaaggtcgctgttggcgaacgccgcatggcgaaaatgaaagaggagcatcgccgctcgttcgaggcgcgttttccgcaactggcgcgggcgggtttcgaacacagctgggccggccgtctctgcctcagccgcaaccatgcgccggccttcggcgaggtggaggaagggctcttctccgcttgctgcgagaatgggctgggcacggtgaaaagcacgctggcgggcgtcatggccgcggacctcgcgaccgggacgacgtcgcccgaactcgaccgatacatggatcacccggagccgtcacggataccgccggagccgcttgcctggcttggtatcaatggcgtgatccgattgcaggaattgcgtgcaggccgcgagggataacccctcgccgcgcaatatgaggcccgcgcctggcgcgacttcaaggaaagtgggaacaaaaaactaggagtaagagcgatgaagacgatgtggaaggcgctgtgcgccgccgccatgattggaatgagcatgcttccggctcgtgcggaagagaagaccatcaatatgggaacgttgtcctgggaggacctgacccctatcaccggcatcaccaagaaggtgcttgaagatgccggatataccgtcaaggttaccgaattctccgaatggggcatcgcttacgccgctctcgcgaagggcgacatccaggttctcgcgtcgcagaccgattacgtcgcgcaggattactggaacaagaacaagaaccgccttgaaaagatatcgcctgtttcgcacggcctttaccagggcatcgcggtgcccaagtacgtgccgatcgacagcctcgagcagctcaacgaaaacagcgacaagttcagcggcaagatcatcggcatcgagccgggatcgggcctgatgaaggatgcgtccaacgccgtaaaggactatggtatcaagctgcaactggtcgagggcagcacggctgccatgaccgcggcgctgaagtcggcctacgaccgcaaggaatggatcgcggtcacgatctgggagccgtcgtggatggtccagaagtacgaagtgaaatacctcaaggacccgaagggcgtcttcccgccgcctcagagctattactggatcggccagaagggcttctccgctgataatcctcgtgctcgcgaagccatggccagcgtctacgtaccgatcgccgacatcaccgcgatcaacggcgcggtcaaggacggcaagacgatggaccaggccgtgcaggattggatcggcgccaatgccgacctgatcaagcgttgggaaaacatcaagaagaactgatcacgtgtgggtcgcccgatgggagtcgggcgacctctaccaaagcaaccagagaagccagcgcaagtggctcaaggggatcgccatgaaaattgaagctgctcaatcgagcgaaatcctgatcgactgccagtctctctggaaggtcttcggcgacaagacgggcgccgcgatgcgatcgattgccgaacgtggcatcggcaagaaggaagtgctgcaggagttcaactgcgttgtcggcgtgaacaatgcgagcctgcaggttcggcgcggcgagatcttctgtatcatggggctttccggcagcggaaagtcgacgctgatccgcctcttgaacaagctcatcacgccaagcgccggcaaggtgctggtcaagggacgcgacgtcgcggctctatctcctcccgatctgcgcgagatgcgcgcgaagaacatcggcatggtgtttcagaacgtggcgctcctgccgcaccggacggtgcttgaaaacgcagccttcggtctcgaggttcagggtatctcgaagatcgaacgcaacaatacggccaagcaggctctcgaaaaggtcgggctggccgactggctggagcgttatccgagggaattgtccggcggcatgcagcagcgcgtaggactagcgcgcgcactggcgtccgacccggaaatcattctcatggacgagccgttcagcgcgctcgacccgctgatcagaagacagctgcaggacgagttccgtcagctgacgaagcagctcggcaagtccgcggtattcatcacgcatgatcttgacgaagcgatccgcatcggagaccgcatcgcgatcatgaaggacggcgcgatcatccagacgggcacggccgaggacatcattctcaatccagccgacgattatgtggccgagttcgtggcgggcatttcccgcctgcatctgatcaaggcgcattcggtgatgcacagtgtcagcgaattccagaaggttcagccgaactcggatctgtcgacgctggcccgcaccacgccggacgccgacatcgatgagctgatctcgctgacgatgcaatcggatcgcgacgcgatcgcggtggtcgacaacgaacaggtcgtcggcatcgtcacccctcgcagcctgctgatgggcgtcaagggttcttccaacaacgaccgcgcggcggcctgacctctagctggagcttcgtcaaatggacacttcaagctttacggatgccttcgacgagtggacggatgcgagccttgaatgggtgagcgaaaacggtgaatcgcttttcgactatgttcggctggttctcgaaggcctctacaacggcatcctctggctgctggaatctccacccttctacgtggtcgcggcaatcgtggcgctggtcggctggcggctcgtcaatcgctggttcgcggttctgagcggcgtggccctcgtcctctgctacgcgatggggctatggtcggagaccatgagcacgctcgcgctggtgttgaccgcgaccgtgctggcgctggcgatcggcattccgatcggcatcgcggccggtttcttcaccgcgctcgaccgtttcatggagccgggtctggatctcatccagacacttccgccatatatctacctgctgccggcgatcgcccttctcggatacggtccggccacggccttgatcgccacggttgtcgtcgccatccctcccgcgatccgcttgacctcgcttggtatccggatgacgccgaaggaattcattgagttgggcgaggcgatcggcatgacgccggccaagatgttcttcaagatccgcctgcccttcgccctgccgagcatcatggccggggtgaaccagagcctgatgatggccttcggcatggtcgtcatcgccggcatcgtcggatccggtgggcttggcgagacgatttacggctcgatccgcacgctcgacatcgccacgtcgatcaacggcgcgattgccatcgtcgtgctgaccatggtgctcgaccggatcacccagagcgcggctcgtatcggagcggggaggaagtgatgcctgagttgaacctgcagttttccccaggcgccttcctggctcctgccgtcgattggctgaacaccaacctgcatccactcttcgtggccatcggctacgtggtggaagccgtcctctcggcgatcgaggccgcgctgttgtcggtgccgccctatgcgttgatcgcgatcgtcgtcatcgcggcgtttgtcttcgtcggcctcagggcggcgatcctctccgggctctgcctcggcttctgcttcctcgtcggactttggaccgcatcgatgcagaccatcgcgctcgtgaccgtcgcggtgatgatttccgtcatcatcgcgttcccgatcggtgtcatgtgctcgcggcacaagacgctcgaggcggtcgtccggccggttctcgacgtcatgcagaccgtgccgccatgggtctatctgatccctgcggtcatgatcttcagtcttggccgcgtgccggcgatcatcgcgacgatcgtctacggtatcccgccgatgctgcgtttgacgacgctggcgttcaaccaggtgccgcgggaattcatggaactcggaagtgccattggcgcccacccgcgttcggtgctctggaagatcgaaatccccttggccaagcagacgctgctcgtaggccttaaccagtgcatcctgctgtcgctggccatggtggtgctagccggcctcgtcggagcgggcgggcttggcgcggaggtgacgcgtggcctgacgcgaatggaaatggggctgggcctgcgtgccggcctcgcgatcgtggccgtcgctcttcttctcgaccggctgagccgaggtctgctcgaccgacgcacggtcgctcgaccgatcatggagtgaggcagcctatgagacattcgttcttttgcatcgatgcgcatacgtgcggaaatccggtgcgtctcgttgccggaggcgggccaatgcttccgcatcgtcccatgagcgaacggcgggaaatcttcgttcgagatcacgactgggtacggcgagcattgatgttcgagccccggggacacgacgtcatgtcgggcgccatcatctaccctgcctatcgcgacgactgcgatttcgctgtgctgttcatcgaggtgagtggctgtctgccgatgtgcggggccgggacggtcggagtcgtaacggctgcaattgaagaaggtctgataacgcctcgcacagccgggaccgtggcgatcgaaacgccggcaggcagagtggacgtcagctacacgatcaaggatggcttcgtcgacgcagtcagattgcacaatgttccaagctaccttcaccaaagcgacgtcgaggtggaggtcccggatctcggcctgctcaccgtggatattgcctatggcggcaatttttacgccgtgatcgagccgcagcggaactggaaaggcttcgagggcatgacggcttcgcagatcgtggagcatagtcaaaggcttcgcgaggcattggccggcatttgtgatccggtccaccccgaaaattcccggatcagaggagtgcaccatgccatctggtgtgacgtaccgctcagcaacggtgccgatggccgctcggccgtgttttatggggacaaggcaatcgacagatctccgggaggaacgggcacatccgcgcgcatggcccagctccacgcaaaggggcgcctgtccgtcggtgagcacttccgaaacgagagcctgatcggcacgatctttgacggtcgcgtcgagggcacggtcgaaatcggcccctttcaaggtatgctgcccagcatcggcgcctgggcgcgcgtcatcggccacaacacgatttatgttgatgatcgcgatccgctcgcgcatggtttccagatccgatgagcgacaaaagcacgcgtgagatcgatgcgatgaaatcatgccaccgcgaagagaaaaacggtcaagaccagagcagccggctcaaggtcggcttcgtcctcgcgcggtcgttcacgctgtcggccttcgcgatgttcgtcgatacgctgcgtctggcgagcgacgagcaggatcggtccggacgggtgagggcggactggcaggtgcttggcagcacccgtcatctcattgcatcgagctgcggcgtgcaggtcgcgccgacgtcggatttcgtcgatcccagccggttcgactacatcgttgtcgtcggcggactgctcaacagggaagagcctgtcgaccgcgagacggtggcatttctgaagctcgccgatgccaagaagatcccgttgctgggtgtctgcaccggcacgttcattctcgccgaggcggggatgatggcgaaccacgacgtctgcgtcagctggctgcacgcaaaggccttcagggatcggttccccgacctgtcggtccggtcggacaggattttcaatctcgacagacgtcggggctcctgcgccggaggaagcagcgccgccgacatggcagcggcgctcgttcgccgtcatatcagccccgaagcggagcgaaacgcgctcgaggtgctgcagatcgagaaggcgcgctcgcacctggaggtccagccacggcggccgctctacgaggaatacaaggattcgcggttaagagcggtgatgatcatgatggagcagcatctcgacggcgatatgccgatagcgcagctcgcggcatccgtgggggtcacgcggcggcagctcgagcgaattttcgagaaggaggcggggatgtcgccggcgcgagcctatgccaaggtccgcctcgagcgcgccaaggtgcttctcgcgcagacgaagttgccgatgatcgacatcgcgatggacgtcggctttcatacggcctcgcagtttacccgctcgttcaagcgcgaattcgggcagacgccatcgcgcgtgcgctcaaccctgatgggcgtcggctgatgcgtcgtgtcggaaccatcagcgagctctggcgctatccggtcagctccgtcaccggcgagcaggtcgaagaggtggaagtctcgcagatcggcatgatcggggaccggcgatatgccctggtcgatagcttgaccggtatcgtcgcgcatccggagcgagaccagcgttggcaaaaggcgatcttcataaggtcgagaaccacggccaccggcatcgagatcctggtgccggagcacgattggcaatccgtcgatgatcccgaccttgccaaaagcatcagccagttcctcgacttcgaggccgacgtgcggccctacgagcgtacgcgcgaggccagccggcgcgatgcattcgcgctcgatcggtatgacgtgtcgccgctgcatctcctgacaagcgcttcggtggatcatctgaagacgctgcaccctggcggcaaccccgaccgccgccgcttccggcccaacatcctcatgcagtcggagccggatatttcggggttcgcggagctaggctggatcgatgccggaatacggctgggcgaggttggcggcaaggtgatcgctccgacgaagcgatgcggcttcaccatcatcgaacaggaggggattgccaacgatcccgaaatcttgagaaacgtcatgcgtttcggcaatcgaaacatgggcgtctattgcgctcccgatgcttcgggaaccttgcgagttggagacggcgtcttcctgtctgagcagtgacgccgttcattccatcatcgcttcctatctgtcgacgaccagatcgctgagcggtttcgagcagcacggcaggaacatgccggcatcgatctcgcgctgcctgatgccgccattgtggttcatctcgacggaaccggagaccagcttcgacttgcatgtgccgcagacgccgttcgagcaggaggatggcaggcgaacgcccgccttcttcgccgacgacagcaccgtttgctcgcctttgacttcgatcttgcggttctgcttctggaactcgacctgccacaccctggccgccgcggcctcctcgattgggagccccggctcatcgatcaccgccgcatcgaagctttcctcgatgtagcttccggcctgaacgccaagctgcgaggagatcgagcgggccgccgccatgaacggcgccgggccgcagcacatgacggttcgatccgcgatgtcgggtaccgccagtttcatgaattcaggggtgatccgtccggtaaggccgggccatgaaggctcgccgatgaccgtctcgggaaggaaatgcagacgcagtcccttcatgcgcgaggccagacagttcagctcgtcgcggaagatcaggtcgagtggtgtacgcgccgcgtgcatgaagacgatgtcggccggttcgtagcggtcggcgaggtcacgcaggatcgacatcacaggcgtgatccccgagccgccggacagaagcagcagcttgacaggaccgccgcgcggacgaacgaagtgccccaggggaccttgggcctttacggtcgcgcccttggcgaggttgtcgtgcagccagttcgagacccggccgttcaccacacgcttgaccgtgaccgtgaaggtcgtcgatcgatgcggcgacgaggagatgctgtagcaccgcgcttcggcgtcgtcgcccaccggaaagtcgaagaggaaatactggccgctttcgaaatcaaaccgcttgccatcgggtgatgcgaaggtgaagctcttcacatcggcggtttcctgatggatgtcgatgcagacgagcgtgtcgtcatgctccggatcccacacattgctgccagcggctgcgccgctcggcctggtcaccagctcaatatccatttgcgcgcatccgatcgatgtaccaagtcgcgaacttgtcgagattggtttcagagaagcgggaataggggcccgggcgataggcgggatcgagcgcgccggcgtgagagcgcgccaccagatcggcgtcctgatcggtggtcgcgatccaaacgtcggtcagcttgtcgaagtcgtagtcgacaccttcgaccgcatccttgtgaacaagccatttggttctaacgagagtccgtccagccgagagcgggatgacgatcgcgatcaccgcatggtcgcccatgaagtggttccaggaattgtgcccccacagatgcgtgtcgccgagatccttcctggtcatatggccgagaagtttcgacgaggcggccgtggcgtcatgggtctgggattcgccggcgcccgagatgatcaggcgctgtgtcctgaaattggtcgcgcagtcggtcagttgctcgaccgctgcggaagggaagccgtcggcctcccatgccttcgtccgctcgtcgtacagccggaagtgttcctcggcctgctggcgatcgtcggggctcagcgtttccggatcgaagccgaagtcgaggtcgacgaaggaaacgcaaagctccggatggttcgccgagcaatgatagcactcgcgattgttttccatcgtcagcttccagttgccgtcttcgataacgtcggtctggtgcgcgatccttgcattgcggatatcgtagggcgccagacgttcgatcatcgtccgttcgagaacgtcgatatcctcgggcggggtgtcggaaaggcagacatagatcagtccgcagatcgacctgaaattgacccgcttcaagccatgacagtccttgtcgaagtccttgcccatgtgcggcgcatagctgagctcgcccgtcagctcataggtccaggtgtgatagggacagacgagtttcgagatgatcgtgctgccggcgtcaagcagacgggaaccacgatggcggcagacattgtgcagcacgcggatctcaccctcgtcgtcgcgcagcagaatgaggctggtcttgccgatatcgaccaccgtcgcatcgccgggttccggaacgtcgcagtcgaggccgacgcagatccagtgcttgtgaaagaagacgtcgatatccgcctcgaagacatcgtcgcgcgtataaagcccggcaggcagcgagtggccgttggtgcgcgcgtcaagcaatgacgagatggacgatgcaagcttgtttagcatgagatcccctgatgtttgtttgagtggagattgcgcttgcatgccttggttctcaacggcattaattctcacgctggcataacaaaatgtaatgcagaggtcggatatgcagtttcgcaggcgtctgccgtccttgacggcgctcatcatgctcgaggcggtgctgcgccgcaaaagcttcacggccgcggccggcgagcttggagtaacccaggcagccgtcagcaggcagattgccttgctcgaggatgagctcggcgtgccgatgttcattcgcaagcatcgcgcgatcgagcccacggccgcctgcgaggccctgggcgcgtcgctggcgcagagcttcgtgaacatcgcggagacgatcgatgccatcaagcaatcggcgaaggacgtggtgaccattggcgccacggtcgcgttctcgtcgttctggctgctgccgcgtctggccgacttccgatcgcaaaatccgggaattcagatccgcgtcgtttcccaggacaaccggatcaacctggatgacggggatatcgacatcgccattcgctacggcgtccctccgttcagcgacggtgtggcgatcgcgtcgcgcgatgatgaactcatgctcgtatgctcgcccgaatatcttaagcgacgcggcccggggccactggccgccaccgatgagttgatcgaaacggatgtcgaggaccggtcatggctttcgtggagccattggctttcaaattcggacctccgcttcgagataaggccgtccctgcggttcaatcattacacagaaaccattttcgcggcgcgaggggggcagggactggcgctcggctggggacttctggtgcagacgttcctcgacgatggaacgctggttcccttcgacgagacaaggctgccgtccggcgctcgctataacgtcgtgttgccgaccaagtcgcggagaacattggcgatcgacagagcgatggcgtggctgaccgcggcgctgcatgcctagatctcggtcgcgttccttggggcgtaacggtctggtcgattgggccccagccgcgcgccaagcgcatgacgcatggctgccctgcgcaaacctgcctaccgtttaggcgcgggcgtgtgtatataattctccatcgaagcgatgcatcctcctcccgcagcgcttcgagtttgcaagagcctcactcctcctcccagaggcgcttgcgcgaacagtggcactcctcctcccagctgctgttcatctattttaagaagcctgccgcacctcctcccgcggcaggcttttttcttttcagccttatcgcgaccgcgtctcaggaaaccgccaccggcttcgagcgcaaacggcttgccgttgccgggtcggcgcgccggcaaagctgcggcggcaggcccttcatgatcagttcggcatcggccacggccatcgttccgagttcatagaaggcgtcgcgcgtgccgccggtgcgatgcgccgatagcagcaggcccggcaatccacgcacgggatcgtcgcccgcgacaggctcttccggaaagacgtcggtggcggcgatgatatggccgaatttcaccgcctccagcatcgcggaaaagtcgaccaccgccgcgcggctcatcaagagaaaggccgcacccggcttcatcaaccggaactcgcgacggccgatgaaaccctcgttctcgctggtcacgctggcgaagacgaacacgacctggctctcgctcaaggtctcgtccagaccgcaaggaatgcagtccagccgctcgatgatctcgttgggcagccacgggtcgaacacccgcacggtattcttgaacggacgaatgagatcgcgcagctgcctgccgagatcgccgaacccgacgatcccgaccggcgcgccggcgaagcggaacacgccgtcgttgccggccagtccatagtgttcggtgccgccccggaaatcgcgatcggcccgggtgatgccgcgggcaagatcaagcgccatgccgagcgctgcctcggccactggcgatgcgaatgccgatgccggcgtgatcacccagatgccgcgttcgacgcaggcctgataatcgatgttgggcatgaagttggattcgacattgatgatcgccttcagcttcggcgcccggtccaatctctcgcgcggcatgtcggtctgcccgaagatcaggaccgtctcgggaagcaatgcatcgacctgctccgctggcatttgccgatcttcggaaatcaccaattcgccgagtttctccagccggcggcgaacatccggcttcatgatcagatcgagcgttcgtggcaaggggtctaccagaacaatattgcggctcatcacgtcatcctccattccctggaagaagacttatcagcaaatgccgcctgtaacagggggctgtcgggcccgtcgccataaaatgacgagaggcgaatgcctgggcagcggcctctcgtttccatcttgccgggcgcccgacagctcagtcaggcgatgccaagcaggtcacgcaaacggttcggtcgggccctcggccggttgcgtgaaccatgccgcgccggtttcggtcatatggatatggtcttccagacggattccgtagcgtccggggaaaacgatcatcggctcgttcgagaagcacatgccgggttcaagcgccgtccggttgccgcgaacgatgtagggctcttcgtggatttccaggccgagaccgtggccggctctgtgcggcaggccgggtagtgcgtagtccggtccaagcccgtggcgaaccatgactgcgcgcgccgcgtcatcgaggctggagcaggctgcgccgagcttggccgcgtcgaagacggcctgctgcgcctcgcgctcgatggcccaggcctgcgcgaagtccgcatcgggctcgtccagaacataggtgcgcgtcagatcggaatgataaccgtcgatacggcatccggtatcgacgagaatgacatcgccggccgcgtaggtctgctcgccgtcggcgccatgcggcagcgctgtcgcttgcccgaaggagacgatgcagaaactcgacccacccgccgcaccgagcgcgcggtgctgttcatcgatataacgcacgacatcggatgccaggacgccgggcttgatataggcatgcgcgcgacggtggacttcaagcgtcaggttcatcgcgtactggatgatgccgatctcggccgcggatttgcgcagccggatgtcgcggagcaggcgcgcgccgtcgacaaggcgttccgcgccgagcgcctcggcaagcgcgtgatagacgaacagcggcagggcgtcgtcgagcgccacgcggtccttcgccgacaggagaccggccaccgtctgcgcgctgttttcgtcttcctcccaggtgatgatagcgccttcgagtttcggcaggctgtcgacgcggctgcgttcgaagccgggcaccacgtagaagaggtcgtcctgcgtgatcagcgcgccgacgagccgctcgctctggtgccagacaaggccggtgaaatagcgcaggctctccgtcgagccgagcaggacggcgttcacgcctgcggcgcccatttggctgcgcagcgtcgaaagccgctggcggcgtgctgcttcggaaatcggggcggggcggggtgtgtccgacatggctattcctcttgatatcgatccgctggtctgccggcgcacgcgcggccgtatcagcaaatcaagtctcagcttgatcgcgcgcagctagtcctcctcgcggtgccaagtcaaccggctgtcgatgcgtttggcgcggtctcagaacgtcggcggcgtgcaggcgctgatcacttcgcacggcacgggtccgacgcagcgaaagcgatgtggccgcctgctctcgaagtaataggcatcgccggggccaaggatgcggcgctcgtcctcgacggtcacctccatgcggcccgaaagcacgattccgccttcctcgccttcatgcacgagcatgacctttccggtgtcggcgcccggctgatagcactccttgaggatctgcaactgccggccgaacaggctctcgccgatctgccgataggaaatcggtcccttgccgatctcgaccagctcctcggcggcgtaaaacgccttgcgcgacttttgcggttcgaaggcgaagaactcggccagcccgatggggattccatcgagaatccgcttcagggcgcccacggacgggttggacgaattggattcgatcagcgaaatggtggagttggtaacgcccgcccgcttcgccagttcgcgttgcgaaagattgtgaagcatgcgcaaatggcgcaggcgctggccgatatcgacggacatggtgtttcccaggtttcgagtgttcgaaatgtaacaacattcgactttgagtgccatgattttcaatgggttgacagcagctagaaaagggcttgttcgaatatacgaattggccgatcagttatcatcaccattcgggagagacttcatggaccagatcagcaaagcaaacagcccgtcgctcgataatttctggatgccgttcacggccaaccgccagttcaaggcagcgccgcgcctgctggcctcggcgcaaggcatgtactacaccgatgtcgacggcaacaaggtgcttgatggtaccgccggcctgtggtgcgtgaacgccggccacggccgcaagcggatcgccgaggcggtcgagcgtcagctgaccaccatggatttcgctccgaccttccagatgggccatccgattgcttttgatttcgccgagcggctggccaaggttgcccccggcggccccggcgcgcagctcgaccgcgtattcttcaccggctccggttccgaatccgtcgataccgcgctgaagatcgccatcgcctaccagcgcgccatcggacagggcacgcgcacgcgcatcatcggccgcgagaagggttatcacggcgtcggcttcggcggcatctccgtcggcggtctcgttaacaaccgacgcgtcttcccgcagatcccggccgatcacatgcgtcatacgctcgacgtcgaccgcaacgccttcagcaagggcctgccggcccatggcatcgagcttgccgaagatctggaaagactggtcggcctgcatggcgccgaaaccatcgcggctgtgatcgtcgagccgatgtccggctccgccggcgtggtcctgccgcccaagggctatctcgagcgtctgcgcgcgattgccgacaagtacggcatcctgctgatcttcgatgaagtcatcaccggcttcggacgtctcggcacgccgttcgcgaccgactacttcggcgtcgtgcccgatcttgtgaccacggcgaagggcctgacgaacggcgcgatccccatgggtgcggtgttcgcaagccgcaaggtctatgacgctatgatgaccggccctgagaacgccattgagctcttccacggctacacctactccggccacccggttgccagtgccgccggtatcgccacgctcgagatttacgaggaagagggcctgctgacgcgcggcgctggtctggctgaaacctggcaggaagcgcttcactcgctgaagggcctgccgaacgtggtcgacatccgcaacctcggtctcgtcggcgccatcgagctttcgtcgcgtgacggtgctatcggcgcccgcgcctatgacgtgtttgtcgattgcttcaagaagggtctgctgatccgcgtcaccggcgacaccatcgcgctttcgccgccgctgatcatcgagaaggatcagatcggcaccatcgtctcgatcatcggcgacgcactgaagcgcgcagcctgatcaattcgttacgggcctcgtttaggcgaggcccgtaacgtgcatcgtgcctaccgcgcggtcgcgcccgtgaccgtcactggtacgcctttgtaggcaggtgtgcccgagatgcggtcgtaggcggagagcgcgatcagcgaattcatctcagggtaatagccggcgatcgatccccttggaatattgtactcgatcgcggtcaggccgcgtgcgctgcgcgaccggccatcagccgccggcagggattcgacatcgatgatatcgccgtccgacaatccccgtttcgcaagatcgtccttgttcatgaagatgacgtcgcggcggccgaaaacgccgcggtagcgatcatccatgccgtaaatcgtcgtgttgtactggtcgtggctgcgcagcgtcgtcaggacgagcgcgtcgggattcttgaccagagggtcctcgtggaggccacggccgatgaggaagttcgccttgccgctttctgtcttccagcggcgatcggaggccggcacgtccagccggaagccaccacgcacccgcacacgtttgttgaagtcgaagaaatcgggaaagacgatttcgatcttgtcgcgaatcctgtcgtaatcggcgaccatgccatcccaatcgatgccatagcgatctccgagcgtcgccttggcgatgccggcaacgatcgcgggctcggatttcagcatcggccccggcgggttcaggaagccgcgcgaggcatgcaccatcgacatggagtcctcgacggttaccgattgcgggcccgtcgcctgtgtgtcgagatcggtgcggccgagacatggaagaatgatcgaggtcttggcgatcaagagatgcgagcggttgagcttggtggtgatgtgcaccgcgaggtccagcttgcgcatagcctcgaaggtgacatcggtgtcggacatggcaaccgccagattgccgccgaggcagatcagcgccttggacgcgccctccatcatcgcttcgacggattcgatggcgttgtgtcccttcaagtcggtcgggcggaagccgaaggctcgctccatcccgtcgatcagcgccttgttggggatctcggtgatgccgaccgtccggtcgccctgaacgttggaatggccacgcagggggcagatgccggctcccgggcgcccgatattgccgcgcaacatcaagagattggcaagctgctgcacattgcccgtgccgttgctgtgctgggtgatgcccatgccgtagcaaaggatgacgctctttgcctttacatagacctcggcggcgcctttgagcgcttcccgggtcaggccggatacggtgacgatgctatcccaaccggtgttgtcgatatcctcgcgcagcgcctccaggccggtcgtgtgctcggcgatgaaggcgcggtcgagaacaccaggaccgccggcggcgagatcggcgtcatcgatttcgaacacactcttcatcaggcccttgagcgcggcgagatcaccgccggtgcggacctgatgataggccgaggcgatccgcgtcgatgacagtgtcgccatctcgaccgggtcctgcggcgaggcgaatttctcgagcgcgcgctccttcagcggattgaagacgatgatcggcacgccgcgccgcgaggcctcgtgcagcgtcgccatcatgcgcggatggttggtgcccggattgtgaccgaagctgaagatcgcatccgtgtggtcgaaatcgtcgagcgtgaccgtacccttgccgacgccgatcgacttcggcaggccgacgctcgttgcctcatggcacatgttcgagcagtcgggaaaattgttggtgccataggcacgcaccagaagctgatagagaaaggcggcctcgttggatgcgcgcccggatgtatagaactcggcctgatgcggatcctccagccgattgagttcggcgccgatccgcgcgaaggcaacgtcccattcgatcacctcatagcgatcggtctcggcgttgtagatcatcggatgcgtcaggcggccctcgtcctcgagagcatggtcggtccattcccataattccgacaccgtatgcgccgcgaagaagctgggatcgacacgcttcgccgtcgactcccaggtgatggccttggcgccattctcgcagaactcgaaggacgacgtatgctttggatcaggccacgcacaacctgggcagtcgaagccttcgggcttattggctttcagaagcgttgccgtcccctgggcgacgacctgctggtgcgcgagcgtctttgcgacagcacgcaaggcgccccatccgccggccggtgcgtcgtatttctcaattccctcgggccgcttcttcgccatgttcatgcactccacacttggtccagccagtatgacatccgtcgatgccgcactgcactatacccaagcacgggatgttgccatagctctataagcgctgcctgacgccgctggatgcgtcttgccgatcgcggcggtcatgaaaacataggcaaagcgggcagaacctgctggccctcgccctgctgatatgaggcggcggagaatatgtggtcacatgaaaacggattggcgcgtgtccgcgccaatccgcgatggagagcccgaattatcagccgaccagttcgccggcgcggcttgatatgcgccgcgagacatccttgaacggatcacgcatcggaatgatcggcgagacgccgagcaacagcagagccttcagatgctgccgtccgctctcttcaccgaccaccggcgcgtatggcgccatggtgggccggcgctcgaccgggtagagcttttcaaattcgacgaaattgtcgaagttctcgtagtcgctgccgcgaagctggaatgtctcgaccggcgtgccatcggcgatcaccacgtcgtggctgtcgagcagcacgttgtagtattcgatcgcttccctgccgtcaggcaaggccgctacaatcgagctgccgttgacaaggtccttcgctcggacgagagcgccatcgacataaagcgcgtggccggccgagatatagagatcctggctcggcatgccgtcatccagagcatccttcgagatgcggaccggcatgacggacggatgccaggcttcgacgctcctgcgaaatgtctggcggccgatccagcgaactggcttggcttcgccggagatcgtttcgacgagatcgccgaggcgcaagtcttcgatcgcaacacatccattcggcgtcgcaatgagcgttccacgcagcaggcacttggctccgccgctgccgccgccacccgagttcccgccaccggagccgccgccaccgttgccgccgccaccaccgccgccgtttccgccgccaccgccaccaccgcggccgccgccccagttgcgtcccatcgctttcgcgggcgaagaggcgatcgccatcgtcgctacggcaattccggcaactcttgcgccggtggctgccgcaaagccgagaaagtgtcggcgtgcacggttagagggtgtttcttccgggtccatcggtgacatattgctctccgtcttttgggttacacctatctattcttgattgctgtcagccatcctacaccaacttcatccgcgataaactcagccgaataggttcacagctactcaaatagcggtagataaaatgtggcatcgaaggttgcgcgaattctggcaattggacaacctataagagcgatatttggaagaaaggcgcccccgcgccggacgcctatctgtcgccgatctggcagggttggaagactggccgccagatgcgggcgcgtgatgcgggtggccccgactggcggtgacgcagccaatgtgtcgacggcaggactgctgtcgccaaggtgagatcgcgtccaggcaacgagtggcagagctgcaacacgccctgtcttgcccaatccgtcaggagctcgttttgttgctgcgctccgagggcacaaaagcgtcaggactggccgcgccttgatatatttggccatggaccgggggcaggaaccatgaagctcaccagggcaagccgccgaccttgacgacgtggccgtgactggagcgcgccggatcgtggtaccggcggatggttcactcctatccgcgtcgtcattgacgcggatagacgctcctgcatgccgacgcgatcgatcgaacctgcctccatcgaccctgcccgagcgccgtcctcaacagaagacgaagccccggcattgagaagcgagcgcccggatcgaattgctgcgccagcctcttcaactcgaacgaaacgctcggctcatcttcgttgaacgccatgcaggcctgcttcatcgaatctttcgccaggtctttcatgaccatccgccggagcaacgacacgtcctgaccatggcgccccgcttcctgcaggaaaagctcaaaggcggccagtcgttgcttgacgtcaggcaacctcgccgatgcgtaagttttcgacatgttctgtgcatgcactctgtaaaccgcctgcggctcgtagacgaaacccacgggccccgcagccgccagcagcagccacatcgcgaggtcgccggcgtgcggcaactcgtgattatatccgccagcctgtttctgtgcgctggtcctgacgacagcgcttggggtcgggacgatattccttccccccagcacttccacaaaatcgcggcaggacaagaccgtttcgcgagcgcctcggcttttgccaagcggttcgctcaggacacgaattccctcatcattctgcagcatcgcgttgccgaacacaaaactcagatcaggtcgatccgccatcatccgtgcgacgcgctgcagagctccgggcagcaaggcatcatcagccgacaggagaagaaacaggtcggaactcgcccactcgatgccttcattgtaggttgaaatatgtcccttgttgctggcatggcgacggaattcgacgcatgggtgcagcgcggccaatccctcgccaacctcctgcgtgttgtccggagaacagtcgtctatgatcagcacgcgaacatcgacaccgacctgcgatacgacgctgttaacagcctcggtaagaaatcttgcataattgtagcacggtatgacgacatcgactgaagttctcatccaaatccccacatgcagaagcagcgttcattcgcgaatattatgcaaatttaaaatcaaatctactgcttcaatttggacattatactttatgatactttcagtataataatatacaggtgtgcgcttattcgttaagcaggctgcggtcgcttgatcgcagcaggccgtaacattcgaagaaccttcttcatgccggaagagatcaccagtcctgcgctgaacggatgatccaaaacactcgctatcagaaagcggtttgccgatcgtcttttgccgagtttgaacaggtgtctgctcagtcccaaaagcaggagcgctctttgatatctcaggctcttgagcgtcagcctattcttgcgaaggatacgcagttgccctatcgcctcccggcgtgcgtttctggagatgctatccgaagaaataaagccaagcaccaccggctcgatatcctcgtgaattgtcgtttgttgagccagccttatcgcgaactcccaatcttcgttcgctcgcgcacagagatcgaaccaatcggtgccggaaaaacacccccggcgaaacagggcgttctgcacgctcagtctgttttctgtcagaagtctcaccacctggttttcgtcgcttcgaagcctgctctcggggggcggcgcgtatgccaccttcgcagccccgaaattgaaatgggaatctctcccgtagataatctttgcgcccgtcacgacaccaacatgcgccggaagacttgaaagaagctccatctgctttgcgagcttttgcggaagccagatgtcgtcgctgtcctgaaacgcgatgtaatcgcccttggcgtgagcaagaccggtgtttcgagcagccccggcgccgccgttccgcggacgacgaacatagcgcacccgatgatcgccgatgctgctcacgaccgcttcgatatcctccgaagacgcgtcatcgacaacgatcagttcaatatccgaataggactgcatcaatacgctattcatcgcagcagtaagactgtggcttcgattgtaggtcggaagtatgactgagacagtggctgacatgaaactcctccggacacctataatgtcgcaagcgcgtacttggctgcgcggcactggaaatcgacgccaaggcgtgtgccgctcgaccgcgttctttcgagatcagcgctaggcgccgcatttgaagtcccgcttttccgcactcacggatcctgtcggcgaggcaggtatgatctgcccgcaaaaagaagcagtttcatcagacgcagcatgttgaatggggtcagagagtaggccttcaccatctccctgcttgcctcgccgtatcgatgcccggcattcagatagttcgccagatgagagcattttgccgcaagcctctttacggctacgcgactggcccgcttgtgcccttcggccgtccgatcgacaattcgctcgaacaccgtcttcaggctccgcaaggatttttcgctgtcgttcggtgtctgattgctgtggaaccgtcgctgaagcaggggggaggaatcgtagtggaaacgcttggtaagcgaagccctgctgaaccaatcttcatcctcgcccatggacaatgccggatcgaagaagccgacctctagaaaggcagcccgcgtgcagagcatcgtgcccagatggaaataacgcccttcggcgacatcaagcacggcatccacgacaaagccgtccgcatcaattcgcggccagatcacctgcgacacctgcttcagcaaagaagtgtcctcatcagtatcgacaaaccagccgacaccctggaaactgaggacaccgtccgatgtcacgcggtccagttgcgcgcgcagctttccaggtgcccaaaggtcgtcgctgtcgagaaatgcgatcagcttcgccgaactctcgacgacgccgcgatttcgtgccgcactaacgcctccgttttgctggtaaacataacgcacgccggggcggtgttcctggaagagctcccgggtaccgtcggtcgagccatcatcgacaacgatgacttccacgccgcttatgccctgactgagaacgctctcgacggcagccatgaccaattggccgcggttgaacgtcgggatgatgaccgatacggttcgatcaacggcgatggagccgaagctctcatgctgctttggttcgaagtcgacatttcggcactgatcattatcaacgaacacggctatttatcctccgtgcggctttgtgcgattatggcaggccttgcgtttcgaaagctcttcgccaaagaccacgccgatcgaacaagggacgatctcttcagaagcttgtgtgccaatgtcgcaatttcttctcgtgcgatttccggtatgctgcgtgcgaacctcgtccttgcgcgcactgcgtcatagcaggccgcattcacgctcatgctggaaggcttccaaggcttcgacttcgtaacgaaatgggcgattgccggtcgccgcgcgtcgaccgcggacacaatgctttcatgcggctcgcattgaaaattccatttgctgtcgagctgtttccagcgaccgtcgcacgcaacgttgagggcatcctgatccgaaaacggcgacttcggaaaccgatcgagatagttgagcgccttttccgtcacctgcgcgttacgccagttgccgagatcgacgagcagcacgcccgcattgaaatagtggccgacgcgcggaaccttctcaagaccacgcttgtttcgtttgacttctgcatcaaggggatcgagaacggcgccgatgacggcgtcgctcaaatcgatatcgcacagaggcgaaagatcgccaaaaacaagaatatcgctatcgagatagagtacttttccaaccctctcggtcaaaacacttggcaacaccaagcgcgagaacgtcattctcgagatgtatggcagcggaatgtagtcgctggcgaacagtgaaacatcaattgcgtgccagtcgatcgtgacagaaccgcggggtgaggagtcgaagatcctctgctgcgtcgcgctgtcaatgccatcgtgaatgacatggatttccaggggccaagcactggcatttgcttccgcgacggaccttatcgttgtcgcaagcggcatcgcataggcggagtcggcggcgagcaccagcgggcatagccttcggctcatgctagaggtctgaccggcacgccttgcgccttccaagcccagtttgttcgtttcacagatgcccactagggttgccccgatacctaaacgcctaaagctgtctgcctgcagtgtcttccaacaaccgaagcccggcaagccggcggtactaagctaaacgggtatgtcacgctaacgcttaagctacagcgcgccatcggtttacgccttttggtcccaccttattctgaagccgcttcgtcaagctcgccgggcaagtcgatgccgctgtcgggcagatttcggcgtggctattggtcatgcccccgcgaccgtcgtcatggcgtcgcgagccgccaagcaacaccgatcatatatttcgataaatatggatttacttcatctgacaacaagacacgtgccgggaggtacgcctttagatgcaaaatgtacaacatttgtcattctttactgaggagtgaaaaagctattcttttgacttcgacaataccagcagagtttctgtgatctcgattagttgtgtgaagtatgcggggttcaagcatgattgctgcaagcgtgaaactgggggaaggcgtcgttatccaccacccagatctcgtcaatctttatggctgcgtcatcggcgccgggtcgcgggtcgggaccttcgtggagatccagaagggtgcccagatcggcgaaagctgcaagatttccagccattcgttcatctgcgagggcgtgacgatcgaagacggcgtctttatcggtcatggggtgatgttcaccaacgatctgcagccgcgcgccgtcaatctgaacggttctctgcagtcggacgccgactggtccgttgtcccaacgctggtcaagcgctgtgcatcgatcggaagcaacgccacaatcgtggcaggtgtgacgatcggcgaaggtgcgcaggtcggcgccggtgcggtcgtcaccaagaatgttcccgcttacgcgatcgttgccggcgtgccggcgcgggtcataggccgcgcaaaggatgcgcctgtcgaaattctatcatctgggagggcacgatgatcggtatcgccgtcgtcggttatggttactggggacccaatctggtccgaaatttcgccgaaacccctggcgcgcagctgatctgggtctgcgacctgaagaaggagcggctgggcgccgtgcagatgcgctatcccacggtgcagatcaccgacgatttcgatgaggtgcttcgggatccccgggtgcacgccatcgcgatcgccacgcctgtcttcgcccactacaaacttgccatgcaggcgatgatggccggcaagcacgttttcgtcgaaaagccgatggcctcgacctccgaagaggcgcggcgcatggttgaggaagccacacgccgtgggctcattctcgccgtcgaccacacgttcattcacaccggcgcggtccgcaagatgcgcgagatcatcgagactggtctcggcgacgtctattattatgactccgtccgcgtgaatctcggcctcttccagcacgacgtcagcgtcgtatgggatctcgccgtccacgacctggcgatcatggattacgtactgccggaaaagccggtcgcggtttcggcgacgggcatgggccatgtggcgggcgagcctgagaacatcgcctatctgacgctgttcttccagagcaagctgatcgcgcatatccacgtcaactggctagcgccggtgaaggtgcgccggacgctgatcggcggtagcaacaagatgatcgtctatgacgatctcgagcccagcgaaaaaatcaaggtctacgacaaggggatcacgctgaacggcggcgccgagcagaacggcgaccaagtctaccagatgcgcgtcggctatcgcaccggcgacatgtacgccccgcagctcgacatgaccgaagcactcggacgagagctcaagcagttcgtcgactgcgtggccaccaacacacaaccgcttgccgacggccatgccggtctgcgcgtcacgcgcattctggaagccgccacccaatccctggcccagcgcggccgcgtcatcgaactcgaacaggcaaggctgagtgcatgatcccgctcctcgatctcaaggctcagtatgcgtcgatcaaagacgacgtcgatgcggcggtgctgcgcgttctggcctctggccactatgtgcttggcgaggaagtcgcccgcttcgaggaagaattcgctagctactgcaacacgaagcacgccattgccgtcaacaccggcaccagcgcgcttcacctgtcgctgcttgccgcgggcgtcggcccggatgacgaggtggtcaccgtttcgctgacattcgtagcgaccacggcggccatttgttacacgggagcgcggccggtattcgtcgatgtcgagccggtaaccctcaccatggatccgtcaaagctcgaagcggccatcacacgcagaacgaaggcgatcgtgcccgttcatctctatggtcagatggcggatatggatgccatccaggcaatcgccgacagatacgggctgccggtcatcgaagacgcctgccaggcgcatggcgcggaatacaaggggctgcgggccggcagcatcggcctgtccggatccttcagcttctatccgggcaagaacctcggcgcctgcggagaaggcggcatcatcgtcacgaatgacgacgagcaggccaagaccatgcggatgttgcgcgattggggccaggagaagcgctaccatcacgtcatgaagggctacaattaccgcatggacgagatccagggggcgatccttcgtatcaagctcaggcatctggaggaatggacggaggcaagacgcgtgcgggccgcgcgttacgatgcgcttctggccggctcgcgaagcgtacgcgcgccgaccgaggccgatggccgccgccatgtgtaccacgtttacgcggtgcgcagcccggaccgagatcagctgcagcagacgctgcgcgacgaaggcatccacaccgggctgcactatccggttccggtgcatctgcaggaagcgcatgccgatctaggctacggcgtcggcgatttcccggtatcggaggcggcagcgcgcgaggtcctttcgctgcccatctatcctgaactgacaatgcggcaggtagaggaagtggcaaccgcggtggagcacgacgcctatgtcagctgatgccgcatccccgatccggctcgtccagtccgtccacggattgaaggagaatatcgccgatccggactaccagaccgaactcgccaaggagctccgacagtcctatggacttgccggactggtcgaactgcacgctcgatttgccaatggcgacgggttcgtcgatgccttcatgcgccgagtgatctggcgcgcgctggcgcgctcctgcggctccgggcttcaggtaggcagcggcgtcggcttcaagcatgccgaaaccttcgagatcggcaacggcgtgttcatcggcgcccacgcctatatccagggccgcttcgacggcacttgcaagatcggagacaacagctggatcgggccgcaggcttatttcgatgcccgcaacctcataatcgaggaatgcgtcggctgggggccgggggccaaggttctcggctcgagccacaccgccctgccggtcgatgtccccgtcatcaagaccaatctcgagatcaagccggtgcgcatcggcgcctgggctgacatcggaacgaacgccaccatcctgccgggcgtcacgatcggcaagggcgcgatcgtgggggcaggcgcggtcgtggtctccgatgtcgagccattctcggtcgttgccggcgtgccggccaaattcattcgctggcgcgaagattgcgatccatcaactgtaaagagtctggaacagccatgaaagacaagcgaattctcatcaccggcggtgctggcctgatcggctcacacatcgctgacctcgtggcaaaggaaagcccgcgcgagatcgtcatcatcgacaatttcgtgcgtggcaggcgggaaaatctggcggatgcgatcacgaccgcgccagtgacgatcatcgagggggatattcgggaccgccagctcctgaaggagaccttcgcaggtatcgacaccgtctttcaccaggcagccatacgcatcacgcaatgcgccgaagagccgcgcctcgccttcgacgttctggctggcggtaccttcgatgttctcgaagcagccgtagaagccggtgtatcaaaagtggtcgccgcctcttcggcgtccgtgctcggccttgccgagacctttccgacgacggaagaccatcacccctacaacaatcgcacaatctatggggccgccaaggccttcaacgaagggctgcttcgcagcttcgccgaaatgtacggcttgcgctacgtggcgctgcgctatttcaacgtttacgggccgcgcatggatgtccatggcgcctataccgaagttctcatccgctggatggaacggatcgccgtcggattgccgccgatcatcctcggcgacggcactgcgacgatggatttcgtccatgttcgcgacatcgcccgcgccaacctcctggctgcgaaggcagacgtgacggacgaagtgttcaacgtcgccagtggcgaggaaaccagcctgcgcgaactggctgcactgctgacccacgtcatgggggcctcgatggagccgcagttcggcccggcccgcaaggtcaacgcagttccgcggcgtctcgcatcaacggtcaaggcggcaagcatgcttggcttcaagtccgaaatcacgatggaagaaggtcttcgcgacctcgtcgaatggtggcagcaggaaaagaagatcgtgagcgccggagaagcggcatgagccagatacctgttgccaagcccgttctcgacgaacgggaagtcgaggccgttcggcgcgtcatcctttcgggatgggtcactcagggcccggaggttgcggctttcgaacgggagttcgccgatttcgttggcgccgcacacgcctgcgccgtctccaactgcacgacggcgcttcatcttgccctgcttgccgtgggtgtcacggccggcgacgaggtcattaccgtcagccactcctttatcgcaacggcaaatgccattcgctactgcaatgcgacgccggttttcgtcgatatcgaagagcatggcttcaacatcgatccggatctgatcgaggcggcgataacacggcgtacgaaagccatcatctgcgtgcaccaggtcggtatgccgtgcgatatgagccgcatcgtcgagatcgcggaccgccgtggcatacctgttatcgaggacgcggcctgcgccacgggcagcgagatcctttggaaaggccggtgggagaagatcggcaaaccgcatggcgacatcgcctgcttctcgttccacccgcgaaaggtggtaacaactggcgacggcggcatgctgacaacctccaatccggattacgatcgcaagttcaggctctggcgccagcacagcatgagcgtcaacgacaccgtgcgtcatggctccaagcaggttatctacgagagctaccccgaggtcggtttcaactaccgaatgaccgacatgcaggcggcggtagggcgcgaacagctgaagcgcctgccggaaatcatcgcgcgccgacgcgaacttgccgcgcactatgcgacggagctcggtgatgccgtcggcatcagtctgcctgtcgagccgcattgggcgcgcagcaattggcagagtttttgcgtcggcattccggatcactgcgatcagcaggaattcatgcagctgctgctggaccgtggtgtgtcgacacggcgcgggatcatgaatagccatctcgagcccgcctaccacggcgcggaaacccatcgagtggccggaagcctgaaaaacagcgtcgatgcgcagaacggttcggtggtcctgccactgttcgtacagatgagcgaccgcgagttgctcgaggtcacggcggccatcaaggacagcattgcgctttcgacacaggccatcgccaaggctggctgatgtggcgctccacacgggacgcatatcaaaggtggtggccctcggttactttcgcgcatcggacagatcgtgtgaccggcaaaggtgtcagtgacgtgctcaccgccatttgagtacatcggggtctattcggttgactttatcgcgccaagacttggtgcggggtggctattagcagagcgaaatggatactgaggcgttgccttgacgatgtctccaggcgaaagctccatcgcctcggccgcctccatttcggccttctgccgcacgggcgcgaatgaatcaccatgcgcttgtcggcttacacgcggtccagtgtcctcgtggtcgtggctgcacgcaatagacgtcattttgccagcgctttccgccctgccgccaagcaccattcaactgttcgcactcgcagcatggcaagtatcccgccagcgcatgcgcatatctgaagtaaaaattcatacagtaaaacccgactatccgaatgtactagatgggttgcgcgcacataacctatcgaggaactaccgattgcttgggaagcgaataagataaaagtgcataggcacctcatcggtttgtaaagtttgggtgatctcgtaatgaacgccatcgatctgaagttttatctgtcacttgttattcggagatggccgcatgtactcaccatcatcggcctgtgcgcggccacgtcgattgtcatcgcgctgctgatgccgcgccaatatcagtcgacggcaaagattctcgttgaagcaccccagatcccatcggagttggtcaggtctacggtgccgacgagcgcgctgcagcagctgcagattatccagcagcagataaccacccgcgacaacctagtcgagctggccgacaagcttgatatttatggcggagagcgggcaaagctggccggagacaaactcgtccgggacatgcagtctcgcatcagcttcctggaattgccgctgagcagtgacggcatgggcggcgcgacgcttctcagcgtttccttcgatgcagagacgcccgcgctggcagccaaaggcgccaatgaggtcgcatcgcttatattgaccagcaaccagcgccagcgaaccgatcgtgcaggcgatacgctgcaattcttcaacgatgaagtgaagcggctggatgatgagctcgcccgcaacgaagcggaattgttgaaattcaagaccgagaacaaggacactcttccggagagccttaattttcgccgtcaacagcagagcaaccagcaggagcgcctggtttcgctggagcgcgaggaagcggatctgcgcacacggcgcagcatgctggtcgagagtttccgcgcgaccgggcaatacgccaacggccccatcagtcccgagcagcagatgcttcaggatctgaacaaggcgctggcggatcagctgacgatcttttccgagacgagccccaacattgtcgcgctccgcggccggatagcagcgctgcgcgccaaaagcatgtccaaggacgaacagtccgcaggtggttcggcatcgaccggatttgagttgcaagtgtcggacattaccgatcgcctgcaggcgatcggtcgggaaaaggcggccctgaaccttagcattatggagctgacgcgctcggtcggcgcgacaccgtcaacggaaacccagctgaacgcgctggagaggacggtggcaaacattcagacccagtacaacaccgctatcgcgcgccgcgcggaggcctcgatgggcaaccagatcgaagcgcgctcggatggcgggcgcttttctctgctcgagcccgccaccgcacctgaaaatgcgttgcgatcacgtcgccgcctggtcgttgcgatggggctggcggccggcatcggattggcgctggcatacatcgttctcctcgaaatatcgaacagaacgatccgcaggccctccgagcttgcccagttgctgcagcgtcaacctctggcggtcattccgtacattccggcaccctcggaaatacgatcgccctatgcaacgcgtcagctcgcgacagctttgacggccggcgccgttcccgcgtcgctgcttgtcgtccactatttctacatgcccctgggagcagcgttccagaagctgctgtccagctttaggagcgggtgaccggtgagttccaaaaccgaagcatgctcagaatctttcgaagtaaccgttggggtccaagtcatggaacgcgagaatgtatctaccttgagcccagacgcactaaaggacaaggaccgcatgctcacatcgcgttttcacgggctgttggcttggagcgaactgtctcctctgaaactcgatcccgacgcgataacacgaaaccgcatagtgacggcaaatcggtcggatgcttcgcatgtcgcttttgacatgatgcgcacgaagcttttgcagacgatgagacagaacaactggaaatctgttgcgatcacttcgccgacgccggcgtgcggtaaaacctttacggcgttgaacctcgccttcagctttggaaatcaacaggattgccgaacgctgttgctggatctcgacctcagacgaccgcaggtcggcaaatccttgggtgtccgcaatgccgcctcaatggagagctttctgcgcggcgagatcgagatcgacgacattttcctgcgccacggagacaatctggcaattgcggcgaacagcagccccgcccattattccgccgaactcttgcagagttcaacgacggtggatgtgctggccaatctgaacagacgcgtaaatccggatatcgtcctttttgatcttccgcccatgctgtcgaccgatgacacactggcattcctgccgaacgtcgattgtgtcgttctcatcgccgcagcggaacaaagcacgctaaacgaaatcgacatctgcgagcagacgctctccgaaaagacgaacgtgttgggggtcgtgctgaacaagtgtcaattcagcgccgagcgatatggctactgatacactttccgcgaccggggcgacttgcgatctcgcccgcgccaactgagagaaaatgaggcacccgatgaatgagacatggcgacgtgacgttctaaaggtaatggcttcgctgccgctggcaaacctcggcttgtggctgggcggcatgaacgccgcccatgcggcagagcgctcactgcttcccgggccgagcttctttgtgcgcggagcttaccagcagccggttgaaaagatggcgcactggaaagctctcggcgtcaacaccatcttcacgatgaatcgaggcgccgaccgcgcggaatggacgaaagaggcggaaaagtacggactatacatggtccgagagcccgcaggcgtcgatgacgattacgttctcacagatcctgcggcattcaaaaaggacatttccagcccttattttctggcgattgccatgatcgatgagccgtccaatttaaaagagggcggcaaagggatcacctatgaggatgtcggggttacgcccgctcaagtcgacaccgtcgcgcgggtcttgttccgtggcgggaagcccttgtggctgaatcatgtcggaaaccacgtcaataacatctatgtcgaaaagatcatgtccgactacgccgacagcccatacatcgactggctgggacacgactcctatccgatcgccaccggaagcgatcttgtcatagacatcgacgactatgcatcgacccaacagggccatgctatcgaccggctctcgcgctggagcggtggccgtccgcagttttcgttcatcgcactgacaaaatacgatgcgtcgtcgccgggaaggaagacaacgccggccgaattccgagtgcaggcgtggtcctccattattcacggcgccgtcggcatcatctattttccgttcatgttctccccggaattctcatacgatgcgacgccggaagacctgcagaaggaactgctggcgtttcacctggaaatcgatgatatcgaagacattctcgtcgacaaggcgaagggcggcaggcgaccctccaagctgctcaagtccgtccggacgacggaaaagcagctggacggcaccttgcccttcccatttgaagcatcggcgataccgaccagctctggtgaatacaagattatccagaacctgtcgccgaaaccggccgagctcacttacgaagcgtgggggttggataaggtcaagttccagccatacgaatgcaaacgaggctttacggtaacggatctcaccaagagctgacttgtttttcagaatgattttgctggtctccggttgcctgccggaggagggggcgcggtcggtcgtccgggtccggaaggcttcggcgcgccgaggtgttggatcgtcatgtcggcgctgtggccgccgttgacgagcctgcaccaacgaagtcgttcaccgccgacagcgcccgtttcaaaatcttaaaccaagcggatgtgaacccggggcggggttaggcgccgccggtttttctggtgtcgcctaacgagccgtctactggcgttgatgacgacgggtgacgagttccttggcgaacaattgcagcagcggaccaacggcgaaaacatatcgccgccacagccgtctgggatccgatgccagccggtgcgcccactccaaccccaactggcgcatccagacgggcgcccgcttcttttccccgagaagaaactccagcgatgcgccgatgcacagacccacgccgcatgcctccggccgctgggcaagcgcataggcaatcttctcggactgcggcgatccgattgcgatgaaaacaaagcgtgctggctccgcggccacgaaatccacgcaggcctgcaggcccgcaggatttttcaggacatttggagggggaacgaagcttcggaaacggacgccgggaaacactgttgccatctgctccgcgaccattgaattggccgcgatcagggtaatgcggtcgcccggccggattaccgtcttgaagatacgcgccgtcaggtccgatcccgtaacgagcggcaggtcgagcgccacggcgtgcgacagcgtcgagatcggcttgctgtcgcaaagcgacatccaggcatcgtcatagtagggcgcaagcaaccgatcgccgttcaggcggacgacatgatcgacattcggcgtcacgatatagcgaaagcgatccagagattcactgttcctcacgaggtcgacagccgcatcctgcgcgatcgtatcgaaaggtgcgccgagaaaataatggcgtgtccggcttgtcggcggagcagcccgcggagattgaacgtccagtagcggcatctgtccctcccttgcgctcgggcacgcgtcggcgtagtgcgacgcagaaaaacggctgttctctttcgtttcaaagataatttatcggcgaattcaagcaattggccgaagttcagcaattggatgtatttatttccgcgcgatctaatccggttcatcataagggactaccgaagagtgatgggataattgttcatggctgtgatattcattttaaattacgtgaaaacggagaggcgatactttgctatacatgatagcgcttctgtcactcacggtggccggcattgcctgtttcgcgcttgtggccatcttcgcgatcgaatgcatcgccggcgcctggccttcgggccggcgcgccgaacgttcgctttccagtcggcccgcaatcgccgttctgataccggcccacaacgaagcgcttgggattgccgcgacgctgaggagtatcggcgatcagatccgcggcggcgatcggatcgtcgttgtggccgacaattgcgatgacgagacggcggcgatcgcgcgcactttcggagcggaggtgatagagcgccgcgattccgtcaaccgcggcaagggtcacgcgctggctgcgggcgtcgcgcatctgcggcaggcgccgccggcaatcgtcgtcttcatcgacgcggactgccagatcgcaggcggtacgctggatgcgctggccgccgatgtcatggcattcaaccgtcccgtgcaagcgcggaacctgcagctggcgccgacgggcgcgagcataggcctagcgatcggcgaattcgccttccgtatcaagaaccatgtccggccattgggaatgagcaggctcggcatgccatgcctgatgacggggaccggcatggcgctgccatggaatctcgtggaacaggcgaaccttgcgaccgggcacctcgtggaggacatgaagttcgcgctcgagttggcgcagaagggcgcgccgccgcgtttctgcgagcaggccctggtaacaagccttttcccaacatctgcggaagccgttgaaacgcagcggcggcgctgggaaggggggcatctggcaatgatgcgcttcgcggtcggcgcgctttcccgtccgagcgcatggcgcagcgcggcctattgcgcccttcttctcgacgtgctcgtaccgccgctgacgctgcttgccgccgccgttgccgtcatgacattggtcgcggcatgcgcggcaatcctgggcgtcggcctgctcccgctggcaatcgccgtggcggccgctttgctatttctgctggcaatcagtctcagctgggcggctttcgccaccgagcttctgccgccgaggcagctcgtcaggctccctgcctatgccgtcgcgaaactatacaaatatcccaggatgctgctttcatccggccgacacgaatgggtcagaaccgatcgctcgcgcccgcaatgaagacgagcaccgtccgggtaggcgccagcgctgattcaccgacagacctaatctctgaccgccgcgttactcaacggttccggaagcggttgcagcagcaagtggtcgcggcctgacatgctatctccctgcacctgttccgagaggcgatcttcatcccgctgccgcacgtcttcggcagtatcctcgatatcctgctccgcgtatcccaacgtccgaagcccttccgtacccatcaggtatgcggactcgacagtctcgcggatctgataatcgacgcctgcccggatcagttcgaccgcgtggccgcgatcgtagcttctcgccaggatcctggcttgtggaaattcatgctgcatcagttccaccatctgcatcgtcgcctttggatcgttgacgcagatcatcagcgcatcggcggaaccggccccggaatggcgcaaagtatcgagcctggtgccatctccaaaaaagaccttgaaaccgaaccgctcggcatcgcggatgcggtcgggatcggtgtcgatcacagacaggctgacgccccttgcgagcagcagctgtgacgcgatctggccaaaacgcccgaagccgatcatcagtatcctgcccttcagctcacgggcatggtcaattccgtccatcgacgcttcgttgcgcagcaatcgatccgccgcaagcatgagaagcggcgtcagggccatggaaaagatcacgaccgtcgtgaacaaggcattctcgcgcgcgtcgatcacgccgccagctgcggcggcggaatagagcacgaaggcgaactctccgccctgcaggaacatcgaggtgcggtgcatggccttgtgattggtgttgccgaacagccgcgccaccccatagaccaccagcccctttgcgacggtgaaggcgacgagcatggacaggagcagccaccattccgccgcgacgacagacaggtccaacgacatcccgacggcaaggaagaacaggcccatcagcaggccgcgaaacggctcgatatcgctctcgatctggtggcgatagctcgaactcgacaacatcacgccggcgaggaacgcccccattgccatggagagaccggcggcatccatcagcagcgccgcccccagaaccacgatcagcgcccccgccgtcatcacctcgcgcgctcgggcgcgcgccaacagcgcgaagaacggattgaggccccatttggaaacgcccagcaaggcaagcagcgcgccgacggccaacaggatgtcgatccagcccgactgctcttgcgacagcggagacaggaatgcgaccaccgccagaagcggaacaatcatcaggtcttcgaagaggaggatcgagacggatttctggccctcggcagtcgatatctcgccgcgctcctgcaacaccgacatgatgacggcggtcgaggacaggacgaaacctgcgccggcaacgaaagccaccggtcccggtaggccgaagatcagcgttccagccagggtaagcgccgtggtggctgccgccacctgcgccagccccagaccgaaaatctggccgcgcatggcccagagcttgtgcgggcgcagttcaagcccgatcacgaacaagaacatcaccaccccgagctcggaaaaactcaggatggacagcgtgtcggtgaacagggcaaggaccgacggaccgacgagcacgccggccgagaagtagccaagaaccgaccccaggcctagccgccggaacaaaggcactgcggctaccgccgctcccattagtacgatagcagggccgatcgtctgccccaagctcgcttccgacatgcactcgcctttcggtatcagctacgcgcaagaggccatgccgcgtgattggtgcctctcgtgatttcgacgcagttccacattttgataaacggatgaaaattatggccatgggtcagccaaatcgaccaagttcccccgtggactgctcgcaatccgctttcaaaaattattgatagcgatgcaaggaccgacagaatagtcgcgtgatcggcaaagggctgtcgcagatcctgcaacacaaaatacctggctgtcgaagctgaaattcggtcgacaatcagaaccgacaacgccggcaagcgccataagcaggattacggctttccaggaagggtttcatcgctctcagacgctgatctccaatccatccggatctgccttgatgaggtattcgccaccgcctctgaaactgcggacggtcgcgaaggtatcttccatgaattgcacgtaggacaatttgccgttcccgccacgcgccagaactgcaaatggagatgtcaccgttttgcgcagaacgtgtgatgtgtaagtgaacgtgccgaagatcgctgcgccgtccttattttcaaaactgtcctgaacttcgaagttgtccgtcctccaatatcgtccgacatcgataaaggtctgaacgagccccttggtgccttggctggttccggcccaaggcatgatctgcttcagttccggatggtcgtaattgagcgagacatatgtgaagtcgtcagtcgtaaattgtttgacgaaatccaaatcggttgggttcgacaagatcgactgaagtaccgctaaaggcgacgccggggatgcgggcaccgcgatagacaaattcgtagcgagagcaggtgcggttgtggacatggttgattcctacgtttggataatgcggcgcattgagatgtcagggttgcttcaagccgggcttgagcgcgatgtgcttatgctcgatgaaatcgtccagagcggccaagccgttcaaacggccaagaccggactgcttgaaaccgccctcctctgtaccgtcgtagaccttcgcccagtcattgatccacaccgagccggcttcgagcgcttgcgctacacgcagggatctgtccaagtcgcgcgtccagatactggccgacaatccgtactcgttgtcattggacagtcgaattgcttccgcctcatcggaaaaccgctggattgtcagcaccggaccaaaggtctcttcctggatgatggcgagactattgtcggagacttccaagagagccgggcggaagaaggcgcctctcgaaagcgggccgaccttgataggaccgccacgttcggccaccttggctcctgcggccagagcggtctcgacaacgccatcgacccgctccacattcgcgcgatcgatcatgggtcccatatcgctggaggggtcagcagctgggccgaccttgacgttgcgtaaccgctcagccaacgcgtctcgaacggcttcgtactttccattctgcacgagcaagcgggatcccgtcatgcagaactggccgctgaagacagtcagcgctttttctagaaccggcaatgcggcatcaagatctgcgtcgtcaaatacaatcatcggcgtctttccgccgagctccatcccaaaccgcttgaggtgccttgcgccagtgctgctgatggcgcgaccggtacgtgtcgatccggtgaagctgaccaccggcacctcaggcgaatccacgagatagctggaaccctccaagccgctttcgaagaacagatttatgacaccgttcggcaggctttctgcttcggccatgacctctgccataacgcttgcagtctgcgcgacttgcgctgggagcttgacgaccgtggtacacccggcggcaagcgccggggcaagcgaccggatcgtcagaacaaccggggagttccagggagcgatgaccgcggcgacccccattggttgccgaaggatcagagagatgctgccaggcttcggtgtaatcgccctgccgccttcaactaaggaagtcgctgccgagtagcgcaacttgctcggaaccatatccagttcgaacgcggcttccgcctttaccttgccgttctccaacgacagaatttcaagcagtttggctcgattgcgctcgaaggcacacgccagttgctcgagcacgcgagcccgcagttcgtgatcatggacccacatggtctcgtggaaggctttgcgagcggccgccaccgctgacttggctgcctggaggccagcgtcggggtagtggccgatcacgtcatatgtcgctgggtcgattgactctttcaacggaccttcttggcactgagagccattgatccagttgaacgccttgtggcttatgacgctgttgggcaccatcttcacagtccttttcaaacgttcagttatcgtctgccgcagcgatgcgatgccccgcttgatccgtcagaaaggtcactcccctgaacttggccgcgtcagcagtcttccggatcaatttggacgagcgaagcagttgactgaatagggatttccgtcgcatcataccggacataatgtcttcaatcctttcgatagagtctcttagcggcctgatcgccttttccgtcgcggtggaaactggaagttttgcggctgcgggaagaaaacttgggctttccgcatcggccgtgggcaaagcggtggagcggcttgaagcgcgattaggcctgcgattgctgtatcgtaccacccggtcgctagccgtgacgggcgagggcgacgtcctctatcgtcacgctgcgcgcatcttgagagaccttcaagccgcggagaatgagcttcatctgcttcagaaagcaccacgaggtcgcctcaaagtaagcgtgccgactgtgatggggcgcaagattatcatgccggcactgcgcgattttcaggccagcttccctgatataacgattgatatcagtcttgatgacgtgaaggtcgatatcattgagggtggatatgacgtggttctgcggcttggtgaattggacgattcaaccttacgcgcacgaaggatcgggccacacaggttcattacgtgtgcatcaccagactatcttgcgcggtatgggatgcctttgagcccggcagatctcctcgatcattgttgtattcattatcgcttcccaaccaccggtcggccggagatctgggccttcaagaattttcaacaagcgaagccaatcaaaccggccatcgtcttgaacgatggcgaagcattggcgtctgccgctgtcggcggtctggggattattcaggcgccaagctatctcgtaagtgaagagattaccgcaggccggcttcaaccgctcctttgcgatcacacagccgatcgcggcagtgtttcgcttgtgtggccgccgatgtcggcacgagttccgaaagtacgtgccttcatcgacttcatcgccgatcgggtcttcgaagagctatactaagtaagcttgtttgagagttggcttcgagggatcaagccggaaatttcactgaaacttcccgggtctgaactctactttttgtagtgcctgcccatctgtagcgattgcggtaccgggtgaaacctctatccaaccggcactgtcatcaagcggctcggagcctatcacgacgccgtcatctttcacttgatagaacagacttggaacgaaacgatctgaagcgtaacgagcagcgtagactttctttccatcgctccagcacgccgcgaaacgcatttgtggcgtgtactcggcttcccgagccaacgtctgaacctgtccgaccgcttgttccatcgccgcgatgggagcctggtcgagccccaggcccgcagcaacgaggaaaattgcttcactgtcggtggctccatagcgctgagcgtagcactccggcggtatcattccgtcaagcttctgccgcagctgcagatgcccgccaagttgcccgttgtgcatgaaactccatcggcccctgctgaacggatggcagttattgcgtgaggtggccgtcgacgtcgatgcgcgtacgtgtgccaggaacacgctggccctggtgtgagatgcaatttgcgtcaggtttgcgtccgaccaagcggggtagatgtctttgtagatgcacggcgtctcgcgttccgagtaccatgcaagcccgaaaccgtcggcattgagcgacgttttcccgatcaatgccgatcggctcagagctacaagcgattgatcggctttgagtacgaaatcatcaagaaagcgcggggctccgatccaggcaaggaagcggcacatcagatgacaacctcgacagtgtcgctcgatatccgaaagcaactgccatgcgatacgtagctggcaatgtcggcgtatagtccgccggcgggatggggtgacttgatcaagcttggcatcgcaagctggagaagcgattgcgttagggatgccttgtccggagtgatgctatcggtagaacctgcgcgttccattgattttccccatctcgaccatcgcaatatacaactgatgttacctgctcggtagtcgcaaaggttgtgtttctgtgttgcggaccggggaacgcgcctcgacggactccactgcatccaagaaatcaacgagggtcgctcatcgcagtgacttgagcgaccgttgtcggtcagcgacaggcggggtgccgaacatgctcttgtattcccggctaacctgcgaggcgcttgcgacggagagcccgcgatcggtcaaccgtctttcgacgggatgcccggcagcgttcctccttttgcaactcggtttagcggttctcggcactacgagatgacaactggacgcacgaaatgtggatcagcgtatcgaagatcgcttcccggaccatatgcatttctcctgactactcgaaccaacatcttggaaaggatagacttatgattgatcttagaggcaagcgcgcgctcgtaaccggcggctctcgcgggatcggcgccgccataacgttggcgctcgcagagaacggtgccgacgttgcgttcacctatcaacactccgcggagaaggccggagcgttggccagctccatcgagaacttgggacgccgagcgatcgcaatccaggccgacagcgccgacccgaatgccataacgcgcgctgtaaacgaggcggtctcatcgcttggcgggatcgacatcctcgtcaatagcgccgctattggccatatggggacgatcgccgaccttgatatcgatgaattccaggccgtgatggacgtcaacgtgcgagcgccggtgcttttcgccaagcatgtcatcccgcatcttgccgaaggtgggcggatcgtgacgatcggttcggcactgggggaaagagtgccatttcccggcataacaccttacgccatgtccaaagccgcgctgacctcgttcacccgtggtctttctcgtgaactcggtcccaaaggcatcaccgtcaacctggtgcagcctggcgcgacggatacggacgccaatccggcaaacggggcagctgccgatttccagaagagcctcacgtcgctcggccggtatggcgatccacgggaaatcgccaatgctgtcgttttcctggcaagtccggccgcgagcgtgatcacaggcgcgacccttaccgccgatgcgggcgccctcgcctgacgcgggcacgatgagcaaggcactggccgacgtttcttcggccggtgcctacgggtgacgcggacggtcgagtcgctggagatctggcggcgctcgcctattccggtgcagtgctcaaggcgggcgaaattcaattttgtttccattgatgaagaggaaagcagagatgaagcgcatttctttcatgaacgggcagatcgatgtcatcggcaatattcatcttccaccccatttcgatgaaagccgaaaatatccagcgcttgtgctggcgacgcccggcagtagcgtcaaagagcagatcggcacgatctatgccgagcgtctggcggcacatggctatctcgcactgacattcgacccttcataccagggagaaagcggcggggagccgcgggatcttgaagatccggcttcccgtgtcgaggacattcattgcgccgtcgaccatctgatgacgttgccctatgtggacgatgcgcgtatcgggcttttgggcatctgcgccggtggtggctatgccatcaaggctgctctgacagaaccgcgcttcagggcaatcggaaccatcgtcgccaacgatatcggcgaggctttgagacggctgctcccagactttcgccaaactctcgcggatgtcgcaaagcagcgcactgcggaagcgcgtggcgccgcgccgcgccgcgacccctggattccggacagcttgaaggacgccgaggaagccggtattgacgaccccgatcttttggaagcggtcaccttctaccgagaatcgcaatatcgccatccaaactcgaccaaccgcctgctgttcaccagctacggaggtttgctcggtttcgacgccttcggcctcgtgcccgatttgctgacacagccgattcaagtcatagttggcggtcgtcgcggggcaacaggtcagtttgaggcaggccagcgcctgttcgatctctcgcctgccgaacacaagcactttctgtcagtcgagggagccggccactacgacatgtattacaagcccgaatatgtgagccaggcggtagagcggctggtgaaattctattcacaacaccttgtcgcttagtggtgccgaatgttgatccagcttgtcgaagcatgcgatcatcatttcgatcagcacgcgaattttctttgatggatgttgacctggtggccgcaggacgaaaatgcctcctggcggcggcggatagcgggtcatcaccggaacgagggctccggacgctatatgttcctccgtcaggccgtcgggaactctggcaatgccgatcccggccaatgcggcggctacgagcgcgacaccattgtcagccttgaaacgcccctgcggtcggatggtgacgatcgcgtcaccatccttgatttgccaggattcggtcccctgcaggagtgcttgatgatcgagcatttcgtccggtgtctcgggtgaaccgtgtgctttgatataatccggacttgcaacatacttcccatgcaccggacctacccgtcttgcgatgagattcgaatcttgcagatagccgacccttatcgcgcagtcgaacccttcggcgattaggtcgacgaagcgatcggtatagcaggattggatttggagctgcggatgctcccgcgccatccgagcgaagacgggcgcaaagtgcgttgggccgaaagttagcggcgcagcaatccggaggcggccgcggatttcgccggcgggaaggattgtctcgcgcgccgcatcgatctcggcacaagcccttgccgcgtagtctcgaaacgtcgccccggcctcggtcaacgcggtgcctcgggtcgtccttgccagaagctgcgcaccaagttcagattcgaggcgcgcgatccgccgactgaccatcgatttggaaatgcccagccgagctgcggctgatgtgattgccccggaatcggcaacttccacgaacgttctcagatcctcaacatccactaggcgttcctcattctgcgacacagcttagcatagcccaggactaccgcagcacaaccgggaatgacaagttcggcgaggaggctttctgggaaatgccttctcaacttgcctcgcgaaccgccaatataggattcattccatgacctttcgtaacggccttaactctctgctgcgccctgaagattccgttctcgtcttgattgaccatcaggcctatcagctcgcaaacgtgaacagtcacgatccgcaggcggtcgtcaataacacgaccgcgctggcgaaagccgcgaaggtgttcaacgtccccacggtcctgacaagcgtggtcgccggtcgagggggattgcttttcaagcatctcaccgacgtgttccccggacaggaagtcatcgaccgaacattcatcaacacctgggaagacaggaaggtcgtcgaaatcgtgaaggcgaccgggcgcaagcagctgatcatcgccggcctgtggaccgaaatctgcgtcgcgatgccggcgatccaggctgccggcgagggctgggacgttacggtgatcacagatgcctcgggtgggacctcggtcgaggcgcatcaggtggctatccagcggatgatcggtgcgggtgtcaacatgatgacctggatggcactcgccgccgaatggcagcgcgattgggcgcgcgaggaaactgcacccgcactgactgatgtcatcatcgcgcatgccggtggcagcggtatcgcctatctttgggagcagcagctcctcaatacccccgtcgaggcggcaagcaagccaggtctgtagggtcgattgggatgacgggatctcgggttgctgtcaccgcaaggcctttcagctcgagcctcgccatcccggtccattgcgcggctccgaaccgaaccgttagaccgcttcaagcacagtccgctttcctgacaaccccgacagctatctgtcgttccgggccatagcgactacttccgggcagagcgaaactccacctggtagcatcccgaaccctacgatgatcactattgccgaaggaaacccacaatgccgatccaccactttccagtcgggctcgagatggatgtgtcctatccggactttaaggtcagcctgatgctgctctcgaccccgcagttgaaattcgagatcaaggaagggccgctcaggcatacggagatcgtcgatatccatgtcataccactcggcaacagcattttcgctgtcagctggcaagagaaggacggtgcgacggtcacaaacgtgcaggactacgaccgagggttcatccattcacatgcaacgttgtcggacggccggtttctccgcatgaccggaagcatcaccgtcaccagagccgctgaccagatcttcgacgaccgcccgcagcgcaacaaggcgctggtgatcgaagcaatgaccgcgctgtttcagcgccatgatgccgccgcggtggagaggctatatgtggcggactatgtccagcacaatcctaccattccgcaggggcgggatgccttgcaggcgatcgtggccagcttgccgcaggatgtctattacgagccaggtctgatcattgcggaacgcaatttcgtcgcgatccacggccggatccgcggctgggcagataagccgcaagtggtggtcgatctcttccggatcgagggcgaccggcctgctgagcactgggacgtgctgcaggacgaggtcgtcaccaccgcccgggatatatcgatgttcgatcctggagaggccgcgcgtgtcgcgggcaatccctagatagaaaatcggctgcgccgcgcctctcgcgcagccgggtaaactaaaagctgttcaatagatctgtaaggagcccgcatggaaatcggtatcgacagttttgcagcaatccttcccgacccttcgaccggcaggctaccttcgccgacggatcgcatggcggacctcatcgaggaagtcgtcgtcgccgatcgcgccgggctggatgtcttcggcattggcgagcaccatcgcggcgagttcctcgattcggcacccacaatcatcctggctgccgcggcggcacgtacgaaccatatccgattgacgagcgcggtgacggttctgagtgcggccgatccagtgcgggtcttccaggaattcgcgacgctcgacctgatttccaaaggacgggcggagctcgtggtcggccggggctccttcgtcgaggcctatccgctgtttggtctggacacgcgccactatgacgcgcttttcgcggagaagctcgatctgttcctcaagctcggcgaggcgacagagatcacctgggaaggccggttccgtccggcgctgaaggggcagggggtgtttccgcgcccgcatcagacgcggcttcccgtctggatcggcgccggcggctcgccggaatccttcgcccgtgccggtacgcttggccttcccctgatggtggcgatcatcggtggaagtttcgaccgcttccgcccgctggtcgatctctaccgagaaagcggccggcgcgccggccacgctccggagaagctcaaggtcggtgtgcatgcgatgggcttcgtcggtgagaccgacatcgcggcaaaggatgccttcttccccggatgggcacatttgacgaccaagatcggtcgtgagcgcgggtggtcaccgccgacgcgtgagcagttcgaggctatggcaggccacggcggcgcctttctggtcggcgctcccgaaacagttgcggcaaagatactgcaggcaagcgaaacgcttggcggcctttcacgcatcacatttcagatgagcaccgcttcgctcgaaacggaggcgatgaagcgctcgatcgaattgcttggaaccgaggttgcgcccgtcgtgagatcagctctgaataccctataagtgcacggctgagatggagatcagacgatgttacggacaccgcggtacccttctgcagtcgtcatcggggcaggtgccggcataggccgggctctggcactggggctcgcggcgaaaggctatattgtcttcggaaccgctcgctcgacaacagaggtatcggacctcaaggcagcgtccggcaggcgtgtaggtcttgcggtatgtgatttggccagaggcgaaagcattaaagcatgggccgagggtgtatcggacgctctcggcgacgccggactgaatgttcttttcaccaacggcggccgctcgatcctcggccctcttgaggttctcccaattgaggaaatccgacgcgagttcgaggtgaacgtgttcggcgtgatatccatgataggcgcttttgtgcccgcattgcgaaaagctcacgggcgaattgtgcagattactgactggaccgcggcgattgccttgcccttcgatgggccttcagcggcgtcccaggctgcgatggaggctatcgcgatggtctaccgcgccgaactgaggcctttcggtatcgacgtggttattgcctccggcgggatagaaacatcgatgggtgtggcggacacggcgaccaaagtagagaaaacgaaagcaacgatgacgcgcgttcatcgtaaactttacaaaaggcctttcgacgtcgtcgggaaggcattggcttcaatgcaagataccgatgcggaccctagcgtggctgtctcacgccttatagcgctcgcagaggagcggccccccgccatttgtggagcgatcacgcatagcgccgaaaagatttttcacgcgatacacccgaaatccgagtttgagatcgaggcgctccggcgcgattttgccggcttcgttcagacagacagttaccgcctcccgcaccctacagatcgcgcatgacgaacggaaacgcaaaggattgagaacatgagttggaaccccgcccttgaaccaggatgtcccgaccaggtcggcatcgatgcgatcgagaccttgatcatcccgcgggcacgcgacatcggaggtttcgaggtcatgcgtgctttgccggcgccaaagcgacagatggtcggcccgtttatcttcttcgatcaggctggtccggccgaactgctgactgggcagggggtggatgttcgtccacatccgcatatcggcctcggaacggttacctatctttatcgcggggattttcaccatcgcgacagcacgggcgccgatcaagtcatccatccgggcgaattgaactggatggttgccgggcgaggggtatcacattcggagcgtacgaccgcgatggcgcgaacggggcccaacagcctgttcgggatccagacttggttagccttgccggagagccacgaggacatggcgccgaccttcgagcatcacggcaaggaggcactgccggtgatcgaggatcgaggtatctccctgcggttgatccttggtgaagcttacggcaaggccgcgcctgcaaagatgctgtctgaaacattctatgctgatgtcggtctcgaggctggcgcccgcctccccatgccggacaaccatgaagacagaggcatctacgtcgtcgaaggttcgatttcgatcgcgggtcaggaatttcaggcgccacagatgatggtgttccgtcctggcgaccggatcacggtggcggccggtgaacgcggcgcaagactgatgatccttggcggcgcgacattctccgcgccgcgatacatctggtggaattttgtcgcctcctcccaagagcgcatcgaagaagcaaaagccgaatggcgggctgagaaatggggtagcggacgcttcgatcttcccgccgacgacaggaacgaacacatcccgctcccggaatgacatctcatctctaccggaaatcgcagagatgggactcgccgaactttatgcatcgttcgtcaaaatcggagacgtgaaatgagcaataaatggcctcacctggattacctcagctggcgggagacatgtgcggcgctgcatttgtacatgcaggtcgcaggcaagtatcgcctgacacatacgccgtggctcaaccattcatggaacgcgacgttctacgtcactcccaggggcctgtcgtcttccaccatccccgatggcgcaggtatcgagatccattttgattttcatgatcatgtcgtcagaggcgtaagtggcgacggtcgccaagcatccttcgcactcggacagaccacggttgcgcaattccatgcgtcgttcgtcaagctcgtactggagctcggcggcacgcctgattttcacggccaacccaacgaggtttcagaccctgtacctttcgaggaagatcatcgcgaacggccctatgaccgagttgccgttcagcggtttcatcaggctctcatggcggtggataacgtcttcaaggcgtttcggacttcgtttctcggaaagtccagtcccgtccatttgttctggggaagctttgacctagccgtcacacggttttcgggacggcgggctccagttcatcccggcggtatcccgtcattgcccgacgacgtcgcgcaggaagcctatgatcgcgaggtttcatcggcgggtttctggccgggaggcggcggcatcgattatccggcgttctacgcctattcttatcccgcaccgagcggatttcgcgccgcggcgatccgacccgatgacgcgttctggcatgagggcctgtcggaattcatcctgccttacgaggctgtccagtcagccgcggatccggatgaagcgctcatggcatttctcgtttccacctacgatgccgccgctgatctcggtagctgggaccgagagttgcttgactgctcgcacggtgggcgtggcagagttcgatctcacgatggcgaacaggcaaaaaaatctgctcccgcagccagtgagaaagtcgagcgggaggatggccaatcgaaggggcgctaccatatcgttgtcgatggcgtcgaagcggagatgacctacagtcgagccggcaaggatcgcatcatcattgaccatacagacgtgccggctgcgttgcgtggacgaaaggttggtgaacgcctcgtccggcaggcaatcgaggacgcccgacgggatgggattaccatcattccgctctgcccgtttgccaaagctcagatcgagcgccatccggagtggcaggatgtgcttcgcaaatgagccatctacgccgggggccaagcatgcagggttgcgaggccgcctcgaacaccgaatgaactgatagagaggaatcacaagtgactcgcgtttccgtcgtcgaatggccggacggtttgtcgcctgggtctcaagaatgggaccggataagagcggagatcgatcatgcaaaaccggagcttctgatcaccaacgagatgcctttcgggcaatgggcaccgaccacgcgcacatacgatagagacatcgccgcgcgatgggcagatctccatgagaccgcaatgagtgatctggcggctttgggtgtggcgagggtcttgtcgaccagacccgtcctagcccaaggcttcctcgtaaacgaagcatttcttcttgaagagggaaactatcgcttcccgcaccacaagcatctattcccgtcggagccagactgggaggaggcctcgtggtttaaacccgtcacctacggcttcactccccaaccttccgggaaaacggttgtcggagcgcttgtatgcacggaactgatgtttccacagtatgcgaggctgcttggtcaacggcaagcgcagcttatcggcgtgccgcgcgcgacgggagcaaaccatgatctctggcgatcagcagcggttatggccgctgtgacagcaggagccttcgtcgcaagttcaaatcgggtgaaaggtaaaagctcgactatcgcgtttggaggcggcggcttcatcgtggacccccacggaaagctgctggtcgcaacttccaaagaacaagcgattgccactgcggaaatcgacgaggctttcgccgatgcggcaaaacaagaatatcccgcatacgtcagcgatgatcaccttgcagggaaatcgctgtagcgccgctctgtcagcatcgccgtgccaagaagggctcgggcaacagcaatatgtagcggcagtcgcgccctccagcttctggctaaagccagttccgcttcaccccatccggagttttgcccatcatgctgaaaatcgattaccccacgaccaaacgcatcgatgtcacagaaacctatttcggacaggcggtgtccgatccctatcgatggcttgaaaacgacatccgcagcgatatcaatgtggccgcttgggtagaggcccagaacaaggccacaggcaattatctttcaaccttgcctggccgcgacgtgttccggcagcgcctcacggcactttttgatcatcaccaagttaccgccccacgcaaacggggcgacaactatttccatacccgcaattcggggcttgagaaccagcctgttctctacgttcgcgaaggtgtcagcggccaggaccgtgtgctggtcgatcccaatggctggtcggacgatggcgcgaccgctttggcggagtgggcggtgtctgacgatggatcgaagctcgcctatgccgtgcaggacggtggtacggactggcgcacgatccgcatcctggacacggcgcgcggcgaagttctggacgacgaagtgaaatgggcgagattttccgagatttcctggaccaagaccggctcgggctttttctattcacgctacccggaagatgccaacccgtcgcagggtggcgtttctaaccatgccatctatttccacagggtcggcaccagccaatcgcaggatcgtttgatttatgcaacgccggaccagccgcactttctcaacctggtggatctcacggaggatggacgatatgccattgtctattcgatgccgggagtggcggcgaacacgctttcggtgatcgacctcaccagcgacgactgggcacctcgcgcgcttgtcgcggatctacaggatgaatggagtgttctcggcaatgtggggacggtattgtatcttgtcaccagcaggaatgccgagcgcaggaagatcgtcacgcttgacctcgaggacgcggcgggcacgttcaaggagctggtttcggaacgggatgccgtgctgtccaatgcctggcttgtcgggggacggctgatagcgacctatctcgtcgatgccaagagcgaagtccaccgtttccggctggacggaacgtccgacggtgttgtcgagcttcctggtattggtagtgccggagggttccgcggcggtgtcgatgacaatgaagcgttttttgttttcaccagtctgaatgcgccgaccaccgtttaccgctacgacgtcgcgacaaacaaaagcagcatctgggccaagcccgacgcagggttcgatttcgatcggatcctcgtcgaacagaagttttacctgtctaaggacggcacccgcgttccgatgtttgttgttcggcgcaaggatgtcacgggccctgcgccgactgttctatacggctatggcggcttcggcatcgccatgcttccattttactctccagcgcagatggcatgggtcgagcagggcggggttatggcgatcgcaaatattcgcgggggcggggagtatggtaaggcatggcacgacgcggggcggtttcaaaacaagcaaaacagctttgacgatttcatcgcggctggcgaatatctgaaggcgcaggcaatatcatccaccggcggtctggctatccagggtgagtcgggcggggggcttctcgtcggcgccgtcgtcaatcagcgccctgatctctttgcggccgcgttgccgggtgtcggcgtgatggacatgttgcgctacgccaagttcagtggcggccagtattggatgaccgatttcggagatccggcggtcgaggagcattttcgtaacctcctcgcctattcgccctatcataacatcgcgccagggcaaccttatccggcaattctggcgaccacggcggacacggacgaccgtgtcgtgccgggccacaccttcaagtatatagcggcccttcaggcggcagaccttggcccgaagcctcggctcgtgcgcattgagaccagggcaggtcatggggcgggaaaaccgacgtcgaagatcatcgatgaattggcggatcagtgggcctttgtcgcctactggacgggtctgaaagtgaggccgttgacatgacaacaatcatcgcttgaaaaggcactcttacaggaaacccacacatcctcatcggggctgatctgccacgaactcccttatatttctgtcgatccaagtcggcttggcgaaagcattcgtgcaaggccagaggtgctactcgataacttaatggcccgtgtcacgcgtatcgtactcaaattggcgtgactgtatttcatccatgttctgaactgtccaaagataaagttgtgagaacggtccttgcagagaattgcctagcggtgttcgggcgtattcaacccccaacggagggccgggcagtatgcggcggctaaccatgccgttgcgttccagctttcgcaacgtctgcgtgagcacgcgttgtgtcacgccgtcaagtcgtcgcttgatcgcattgaaccggcgcggttcgatgagcacggcaaggacaagcatcgaccatttatcggcgatctgatcgagaatttcccggctcgggcagtcggctcgatataccggatcaacatcggacattaggtattctccagcatccctgggatggttaaggtgcgtaattgacatcaggtatacaaatcgtaccttgagttcaatggctgatattggccatgaaccaatgggaattttcaatgatcggtgactatacacatttgcgcattcgcctctccaatggcgtcgcgttcgtgacaatcgataatgggcctgtgaacatcctcgacgttgctctcatgagcgaactccggagctttctcctggcaagccgggggaatgaagacgtcaaggtcatcgtgtttgacagcgccaaccccgacttcttcattgctcacgttgacatgacgcttatcgaccacccgaatgcgttcgacggactggcagaggacacgccaaagggcctgaatgtgtttcaagcctttgctgagctggttcggcatcagccacaagtgacaatcgtgaagctcgctgggatcgcccgtggcggaggcgctgaattcgtgacggcagccgacatgacgttcgcggcgattggtaaggctggcttggcacagtgcgaggcgttgatgggcatcgtgccaggcggcggcggcacgcaatatgctctcaaccggttgggacgtaaccgagcgcttgaagtggtactcggtgccgatcttataggcgcagagcttgctgagcgatacggctggatcaacagggcagtaccagccgatcagctggacgccattgtagacgcgatcgcctacaatattgcggccttgccggacggtgtcatcgcggccgcgaagcacgcgctgccgcccgctcctatgaacgacggcttgcttcgtgagcataaggcatgggagggcctgtttgcgcgaccggcggctgaagcattgattcgaggcggccttcgggctggtgcacaaacggtgcgcggagagttgcgtcttgaagaactgctacgcgaactaaaccgggctctcgtcgcgtaaccaacttgtggctgcttcctcttcccacgaccggccgggtcttcacgatgacaatttccgagttttcacaacaggtcgcagggaaggcgacggatatcctttcggcctttgttccgccttctgcaacactgtttggcgcgctccggtgctacttgggcctctgccaatgcgctacaacacacatggtcatggaagcactctttgtggcggagcggcggagagactcttcggtccgcatttttagggggtgtttcccagaagttgcggctcactcacacaaatgcggaggatcatattttgcagtcacttgactacgatcaactcatgcgcgccaacctgacccgtgtgttcaatgagcgcgaccctgcaagacgcctcgaagcaatcgccgaactatacacgagggacgccgtcctcaacgaaccggatgccacgttttctggacatgcggcgatttcccaggcggtcaccgatttgctggacggctttcccgcggatttttccttcaccgcaatcgggccggccatcggccatcactccatcggtcggctccgatggagctcaggtccgccaagcggacccgcagccgtcaccggtatggacatcatccaagtcgaggatggtcgcattcattccttgcatgttttcatcgaaccaaatctatgaccctaaatccatggtgtagtctcgcgttcagaaactattccaactgactgctgagcggccccttcacggaggtccagattccaaggcgcacttgctgcgaaaacatcaacccgacggtgtgcgaagcggcctgcctcatcggttggtcgccgcttgcggacttccttgcttctctgaagctgcgccaggagcaaaccatcaacggagatatgtcatggcagacaactgcccagttcttacgccggccgaaaggcaagtcgtcgatataatcgagcggaccgaccaagctctgatggctaccgtctacaaggcccttcagaatgccacggatcaagccgcggcggactttcaatcgatcggctcctcggacaggccgccggcatacgaatatttcgcggccgttctacatcagaaaatgtactgcgtgatgtgcggagcagatccggatacgatgcaaggcggcgatcccgacatcgcggttaatgtcatccgcaacagtcaaaacatcgccaagcactattggggcgccgatattgagcctgacgcccagccctagctttggacgtcggctgttcagccaaatcaatacttcaggcgcaagttgccggcgtgacgtcgcgtagcatccggacgtcgccggtcgtttgtcgcgcgattacgtcaacgcgccgcgctggccaagtgtgtgaagcccgcccgatcataggagcacaaaatgaccgtcagctacaaaagacagcaggttggaaatgtggatgtcttttaccgagaagcgggaagaaggggcgctccggtgctgctcttgcttcatggcttcccttcctcgagccacatgttccgcgatctgatcccgcttttggaggatcgcttccacgtcatcgcccccgaccttcccggatttggccaaacacaagccccgggtcgaggagattttgattacacgttcgacagttttgccaccgtcatcagcggcttcactgaagctttggatcttcaacggtatgtactgtacgtcttcgactacggcgcaccggtcggctacagattggcgacagcgaatccggagcgagttcaggcgattatcagccaaaacggcaacgcctatcttgatgggttcagcgacggctggaccgattgggaagcctactggcgtgaccccactccggaaaacagggaactctgccgcgcggcactgtccgcggatgtcatcgaaaactggcaataccgcacgggaacatcgaggcaacgcttgtcgcccgacggatacctactggatatcatgcttatggctcggccgggcgcgcaggaaattcagttggacctaatcttggactacaggtcgaacattgagcgctatcctgaatttcaggcctacttccgcacccaccaaccgccttttctggcggtctggggtaggcatgatcccgcgttcattcctgcaggcgccgaggcatacaagcgggatcttcctgatgccgaagttcattttctggacactggtcattttgccttggagacgcacgctgcggagatctctcagttcattcggagtttcctgcagcgacacatttagccggcttcgcagatcgccagggaaccttgaggcacggatccctggcgccctttcgtaacgatcaatcccagtaccaatcatttcttttgcaagaattctaaggcagcgactttttaaggagaaaaaattgaactctctcaacgactatattttcagccttttttcgattgccgcagttcaactcgtcgcggtgatgtcacccgggccgagcttcctgataacagcgcaggccgccgttgcgcgatcccgctcggacggcatccgcatcgccttggggctcgggatgggctcgctcgtttgggcgttggccgcattgctcgggctcaatgtgctgtttcgcgcgctgccaatactgctcgtcattgccaagttcctcggagcgcttttcattctctgggtcgcgttccagatattccgacatgccaatgcgcccctcgcgatcgaaaacgatagtccgacagaacaaccagtgcgcaaggggttcctgacgcagatcgccaatccgaaggttgccgtatttttcggctcaatctttgtgtcgatgcttccggttaacccacccatcggagcgatcatcgcgctgttggtcatcgtcttcctgatcgagtttgtctggtactcggtcgtatcgataacattcagtttaaggacggtcagagaactgtacacagcggccaagtcttgggcagaccgagcgacggggctgttccttggcgcactgggcgccaagcttctttgggatcttggcttatcggaactattgtcgtttggcagttaaccgcgggattgcacgcaagccggccgccggtccgccgttgggtcggcgccatggcggccaccagcgttcgaaatgcgatcaaggatctgcaagtcgctcacgatagatcgcggatactccccggcgaacgaactggaacaaatccaacgcctcgcgttcggggcccgcgggctttccgcttaccagccaaagcacgaggctcgcgccgcaatagctgatgccgccgatcagtaccatgatcgtcagctgcaggccctccggctcgttgttggccatgaggccgacgctccagacgcagccagccatgaagagtgtggcaacgctcgcacgccagccggcgagaagctgagcccgtaccgagacgccgatgagacgcctggccaggaaaacatacatcatgatgccgatagccgcgctgatgcaccgtgcgaacagaagaccactcagcccacccaggagcaagccggcgaaaatcaggggaaggcggatgaagatgaaagtgaggtcaagctggaacagagacctggtgcaaccgaggcccatggccaagggggtcaccggcagtttgaaggcggtggtggccaagaccacgcccaacacctgagccaccagcgcggccgatgaccatgcggggccaaggaccatgtcgatgaagggcctggcgaccagcgcgaagccgacacccatcggcaacgctgccgcagcaagcaggctctgggatcgaaggaatgcatgccgcaggcgttcgggatcgtcctgaagccgcgcgaaggctgggaagagcacgcccgagatcggcgcggtcgattcacgcaccggcagcgaggctaatctgtcgcctaccgtatactggcccagggggccggcgcccagcatgtcgccaagcgcgagctggtcggcgcgccaattgatctcattgaggccggagctcagagccgcccacccggaaaacgagaacagatttctccagtgagcaaatgaaatgcgcggcagataagggaggagaacatacgacatcaccacaccgaccacctgcgatgcgagcgtgctgatcacgagcgcccaataactgcggaaagccaaggcgatggcgacggcgacgaccacgccaaccactttgttgatcaggtcgatgaatatctcctggtgaaaggaaaggcgccgccggaaatccacgagccgggggtttgcaaggccgccgacgagcgctccgcctgcaagcgcgaaaaatatgctggtgagccggtcgtcgtgataaatccacgcggcgggataacctgcgatgaccagcacgatggcgatccccgacgcacgcagggcgttcagtgtccatgccgtatcataatgctcccgctgcgggttcttgtgctggatgagggccgaactaagcgaaagctcggttacagccgcaacgatcgaaaggacgatggtcgcaagcgtcaccaggccgaaatcgacgggcgtcagcagtcgagccagcaccagcatgctgaccacgccaaggagattagaaacaacacgtccgccggcggtccagattgctccgacactcaactgtttgcgtacaccttccaacgtcgtctcctcgcgtcatgcctgcggtactcatggttctaaagacagatattcatcagccggtggtgcccggccatcgcttgcccgcggtgtgatgcgagcaagagatctttgcatcgcggcgctgacggcaatggcaaaagccctgggccaggcagctgctgatcggatcggccgcagctccacagaagagctgacgaatgctgatctggctcgtcgcaatagccatgccagccgcttctcaaccagctcgctaaaccggggttcttcgcgcgatggaacgcgcgatttcaagcgcctcctcatgtgtatcggcccagtgcacggtgctgtggttttgacttgtgtactcgtaaacagcgcgattcttgccgaagcggtcaggcagcagcacgctatgttgcgaacgcagcgtgcagagaatatgcgggtgcatgcggtcggtaaccagcaccttacccgtgtcgagcctgtggttgccgctcgccagcatgtagcgcgagaagcgatcgtagctgccggcgatctgcctgttggcgatcgaacggagcgccggcgccagcttgcggacacgggagaaaaagcgccccggaaacaggacccgcatgccggcgggatcatggtgggtccagtcgaacacctcgaccccgctcggcgctgacgatccgacgccctcgatatcgtcgcgggcgagccagatgacatcatgctcaggcgcgctgagcctctgctgctgcggcagcagcagcgccgaatcgtggaccgtctccacacggacgttatccgggaatacgctgcgtgccgaagccgcgctgacaggatccctggccagaagcaccacatcgcgatgatttccgaagatcgttctcgcctcaaggcgatcctcgtcatcgacgaacagcatggtcgagggcaacgagacgaggcggttattggggcacgcctcggcgacgatgcgcttgatctccgcgtgccgcggccataggcgcgagaccgtgactccgcccgaaaacagtatcacgccgtccccgacagcccgcatcatttcctgaagatcgaagttgagcccatgcgcggtgtaggcgatggaggcattgcgctgcttcagataatccatggcggccacccacatcatatggttgccgacattgaagtcgaacgggaactgcaaaatcgctaccggctgggattcaggtatgtatcggtcaagacacgcccgaatcgcttgcctctgcaactccagttgcgccgcgtcttccgtcgaaagcgcctgaccggtcacgtgaccatgatcttgattatatactgcagcggctggcatcgattctcgagtccttgctgtatctcatgctggcggttccgtctgaaacgtgtcttgcaggacggagaaggttcagcgcgttcgggtcacaagcaggtgtccggccgaggtgtcgaaggtcagtccttcccgtccgacgcgagagaagtagtcgtctgtcgcctttcggcatccggaccaatccgaataggcgcgaagtgcaacggcgccgcccacgatgacatgaggcatgatccgctccaggcaggcggtaacgggctcgtaccaatccacatcgatattggccaaagcgaccggctcggcgactgcaaccgtgtcttgcgccttgccttttatgagctggacgttgttggctccgacggcataaccaaacctggcgaagttgtttgtcaccgtcgccatcaggtcttcatcgtagagatagtattggtcgccgccgaggccgacagcgtcgccagcggcaatctcagcgtaccgggctttcatgtcttccccgtcgtgctccgatggtggagggagcatcgcaaacaggtcgtacacgcgcatcgggcgctgcggcgccttggccgaacacatcaggattgccgaaccgccgcgcgcgcatcctgtttcaatgatcagcgctccgctccgggcggttcgacgcacgacttcgagcaactggtgaagctggcgatcggtcgtgtaggaaagattttcgttgcgtaccttcgaccaagtctgtcgaacggccttggggtatgcgcttcgacgggcacgttccgaaagcgctccaatgcgccagcgggccgcatgcgccaccctatttattgcttccatcacgcccgatctccctgcaacagcgccggtcccggcgaggtcttgctcaatgctgcattctacgaccatcttcggttctcacttgcgtacttacaacgttgacaggcaactcagcgattcatcaaaactaggtaagccaggaagagggggtctggggtcttgcacccatctctgaaaaaacattgaccgtcatctgctgcgcccgtctgtccgcgctgggcaggttccttatgggaacgacgacgaccagagacagcaaacgctttatccagttctttactttcctccgccaactgaaccgtggaggttggaaagtccaatcgttgtccaggccccacacccattgaatcgacccagtcgaaaacaccagcgctccgctcgccgctctatagtaggcagcattggagatatttggatttgtgccacccggcagtggcgccagaacttcgttggcacgcgtaggggatttcgaaaggatgacgagaccggaaggcgtttcttcgttgtcttgaaccgcatcccattcgtacccgaccagtcctttcagcctgtcgccgtttcttaaacctgtgcccgcatagatcgggtcagcggcattggaaacgatgaaatcaaacccctcatagacgctgtcctgttcggacacataggcaaccccaagcagtgcattctccggtctattgacctcctcggaacgaaaccgcgtcgtcgacgcacgcggatctacatcagccatcggatcgagcggtgcgccggcgccaatacccgacgaatccttgtatacggtcagaacgcggttcgcctgcccctggcttgagctgtcgaaccggacttgccaataagcagtattggcagagtaaaaggcgagatgaatgccgccatcgcgcgacaaatcaagtctatcccgttgttcttcggaccaatactcgtcgtgtccgaccgaaagaaatattccgtgcgaaaatagttgtaaagaatttccgtgaacatcaatattcgaataataggatatgtcgtatccttgagactccaaccaacggaccatattatactcccaagtgagcatattattacaattaaatccgtcagtattgctgaatccgaggtgcgtggcgctgtaaggccgatcaaaacttacctgatatgctcttgtgttatcggcgctattgacgtcataaacactaaagccaccgaacgcattgtaggcttgcgcggtcgttaccgcatcctggaatcctatgtcgctggggtgattgtctttgcgcagaacaaacgggacgagcgactgcttgccgcttctgcaatcggtcaacttgataacatacagtccgcttgtccaagccgcggatgtctgcagctcataggacacgtcccaaaggcattcgacgaggcgcgtgtccttattggtcatcacagggctcgcctgggtcaatccgtccagaccaagcgcgctggccataagcctgccgccggcgccaccgtaatagccaaggcgatatacctcgagattatattgtccagccgcagacagggaaacctttacgttcaaaccgtctccggcattgatactcgtggcatccgcgaaggcctcgatctcgtggtttgtcgccagatttgtaatcttccaatcggttgtgcccgcattcaggttttcgatcacaatcgagttccgggcattgatgccgacctcggcactgctgacgcggttgaggccttctgtcgtggatagctccgctagagcgcggatctggctgccaagaagatccgacgatagactgatgcgagcgcttgtctctccggcaatatttgcccatgccccgtcgattttttgctgccaacggtaagtcgcttcgttgtcaagactttgcccacggtcattaaagacacctgcggtcagcatatttccaacggttgcactgcccctaaggataacatggtagttctgttcttcggtcgacgaagtcggtatctcttgtgcgccactctctacactaccatgcatacgcgtagaactttcgaaatagcaaaataaaaccagtgccctgcaagaccttcgacaaaatttatggacgctctcaaagtctccgtcaacgaccgactggtcttgccgacgccacctttcggctgcgtggcgagggcagccactgcccgtttgacggggaagacaggccgtccattctccatttggaggggctgcgacataatgactttaaattgtgagcgactcgcggcccgcaacaacggcgtatcaatacaccgcgatatacacatcttgttgccaacgttactttggcggaattgattttctaatcctatggccgacgagctggcagcaaggcgccgaaagccagggaccttccgacatcaagacgaggctcgggtcgggcggcgaccgccgtggggcgcgcgcgttcgcaaagatcgccccgcaggcttgccggcacgctccgtgtccagcagccagacgccgcaacccacgaggaagaagaaccaggagtatattgcggcccagaaatggaccgtcgatccgacgataacgaaagtggcgatgcagatcagatagcctctcctgtagggctcaagcgctggcgcgacatcccgtttgcgagccaaggcggtccagatggacagaatggaaacgaagaggattatgagcgatggcaaaccatagcgcatcgcggtcagcagccagaaattgtcgaccgtggtgcttaccatccacggcgggcggacccagtcggcctgcccgatgccaagcagtggattgttcatgacggaagccgaaccgtaatcccagatgagaagacggtaccaaccagtctgtcgatcgaatgtgaagtgtgaaatgtagaactgcaccggggtctggttggatccgaactcgacgaccaggtagcttacaagcgcgatcgcccagagcagcttccactgccaccagaaccgccccagcgccatggaccagatcagcagagccgcctgcaaggcgacgccggcgatcggcgcggaggagagagacaaaaatgtcgtcgcgacgagcaggcttacggaaagccagcgcccgaaaatcagtcgcttcgaaacatccaccgaacccgccaatgcgacgagactgccgcagaacacgccgaaaagaatggagtggctgaatgggccttgcacgcgatacacgcccatacgcggcggcattggcgccaattcgacagtgggaaacactttgccaaacagttccaacaggatcgcgcggccggtcatccactcatagagggcgaagggaagcagaagcgcgatgagcttgacggcaaacgccaccatgttgctgaaatcctcggcgctgcgaatatagcatcgcgccagcaggtaggctcccatcccatcgatgaagtatgacgcgctcggctgcagcgcagccgggatgccagcggcggcggtgagggcaacggcgatccaaacgcaatagagaagaacgcccaaatcggcggcgcgaactggaccggcctttcctgtgagccaggacgccagcgatggcatcagcgtcattatcagcacgatgcggtagaccggcaggttgacgcccgccaatggcactacccatggaatgatgaggccaatcatgaagaacttcaccgctggatgaaggtctgcctttgactgttgcgcgcgctcagaaggcagcgcccgtggccgtcgcgatccaaagtttgcagtgtcgtcccgctccgcctgttcctccagcctgccgccgatttcccgtacgctggacgtcgcgcgcctagacatgaagcggtccgcccgcacttaccgccgttgcttcagtccggcctcgctttaccattccgtgcgagccggaaaagcgatcgtgaaaccagagcgaaaccgcaggaatgcatggtcggcgatcagcccgtctcatccatcaactcctgagcagcatgaaatcggcacctttcagcagcggccgtaaggaactcgagaaggctgcgcggtgtgacggattgcgccagcagcgcagcgcctcgccggtggcaacggcggcgcggaacaccaatgtcgcaagagtgccgtggcgcaaggcatagtagcggatccggtttgcggtctgtagcgcgaaaagcttgggatttcgaccgctgcctccaccagcgtgcatgaccttggcacgcggctcgtagagaacaccgaacccggcctcccgcacgcgccggagaaaatcgacttcctcgctatacagaaagaaggactcgtcccattgaccggctgccttgcgcgcctttgccgatacgaggagtgccgaacccgtcgcccagtcgaccagaccggacctatcataggaactggctttggttatcgtctcacccaggccgagtcgacccgcgatgccaccacccaaaagcgcgtccgcccaggccgtcgtcatcgacggttcgcgccttaggcttggatcgacatgcccctcttcgctgtagttcgtgggcacaacgacacccacggacgggtcggaaagccgttcgagcagcggcattgccgcattgggatagagacgcaaatcaggattgaggacgagaatggcgcgatcgtcgtccactgtcgcgacagcggcgttgattgccgcagcataacccgcattgcgccccatgcggatcactctcgggcggacgggatgcgcttcagccaactctgccgatccgtcatgagaggcgttgtccgcgatcacgatctcgaaagcgtccaccccttccaagccggaaggtatcgaatcgagcagcggaagcagagcgtcggcactgttgtacgtcacgatcaccacagccaaactggtctggtcgtctcgccgatctcgttgtgttttgcctgacatgtgtctcttcctcgcctcgtccattgtcctgtggcgacgcccgctctcgtatccccagccatccgagggtccagccgtcacatacggtgctcgtttttatttagtcatcacgagccgcaggaaggtagttaaacaaaagtacaattcgggcgtaaggcttagcttgactttgcgcgctacgctgcgcagcaacgggcctgctccatacggtccaggcgcgctggcggtatttagccaagcctttgaagttgcgatgggaactgaatccctggtcgcggtgtttctgcgacatggatcaagcgatcaaccaaacggatgtcagcgcagctgcgtttatgtcgtctcgactggtttacaccacggatatcgagagtggcatcacgcgcaaggcggggaaaaacggcttcctctactacgcgcccgatgggcgtaggattacggacagcttggaagtttcacggctgaatgcgctggccatcccgcctgcctataccgacgttcgcatatctcccaatcctctatcacatctgcaggcgatcggtatcgatgcgcgcggacgccggcagtatcgttatcatcctgaatggcactcggaacgcgcgcgcgcgaagttcgaccagttgctggccttcggcgaacgcctgcccgacatacgcgcgcgtgtcgatgccgatctgcgcgtgcgggcgccgacgatggacaaggcattggccaccatcgtctggatgctcgacaacctctacatccgcatcggcaatgccgcatacgcggaggataacggctccttcggcctgacgacgctgcgccgaaggcatgtcaagacagacggttcgcaagtgaaattccgcttcaagggaaaatccggcaaggaatggaatctggttcacacggatcgacgcatcgcgcgcgtcgtccgcagcctgcaggagctcccggggcagcaattgttccagtatgtgtgcgaggacggtagccgccggcaaatatcctcccaggacgtcaacgcatatatccgcgacgtatcgggggacgagttcagctcccgtcaatttcgaacctggggggcgacctgcgcggccgttaccgctctgacgcctctggaacttgccgccaccgaggccgcgatcgcgcggcaaatgaatgaagtgatcgatgcggttgccgccatgctggtcaacacgcgcgcggtctgccgctcgtcctacatccatcccgccgtgttcgacgagttcaaggccggcagattgggccagttgctgcgcacgagaccaacgcgaagcaagcgtttgttgaagtggatggatgcggaagaagcgcgtgtgctggggtggctgaaatcggtatcctgaacagtcgcgttttcgggccgatggtccgggcgttgcacgttagtcgctactgacgctccagaagaccgaccatggcgacaggtttccgccggatgacgaacccaggctgaatagcatcccggtgtcgtccatcaaggtgtcggttgcaactgtttcgttcccaaggttcgcccgcaggcgcaagtggccgccggtggccagcggccagtcgatcgcgaccgccgtgagaccggaaggggcgatgatttctccgcggcgcatcccggtcagcagcggaacgatcttctggtggcggatggcgagtagcgcggcgtagaaatcatgcatggcggcggcggccggctcgttcatgctcgaccagtcgagcttggccatctcgaatgtcgatggcgcggtcgggtcgagaaggtcgtcggcatcgaagcccggcaatcgcgacagctcttcgcggcgtccctttcgcaccatctcgttcagctcgtcgttgagatcgcagaagtaggggaacgcatcccgcgcgccccattcctcgcccatgaacaacatcggtatctgcggcgccaggagatagacggccgccagcgccttgacgatgtgaacaggctgcgcggcgatgatccggtctcccatcgcccggttgccgatctgatcgtggttctggatgaaggagacgaaagccgttggtggcaagtcgcgcgtgctcttgcctctgctgtcgccgcgatagggcatgtgctggccctgaaacacaaatccttcggcgagcgaccgcgccatcgcttcgctatcctcggcgtagtcggcgtaatagccgaagcgctcgccggtggtggcgacatgcagcgtgtggtggatgtcgtcgttccattgggccgtgaacagggtagctttgccgtcgctcgcgcgctttagcagatcgctgtcgttttcctcgttctcgacgatcaggtgaacatggcgggtaccggcggccgcgcgcacgcgccgtgcaagctccagcaggagatgctcttcgctactgtccttgatggcatgaacggcgtccagccgcagcccgtccagcctgaaagccgtgacccaatggatggcattctggataacgaactcgcgcatcggcagcgccgtagcgccatcgtagtcgataccctttccccacggcgtcttgtgccggtcagtgaagagcggcgcgtagagaggcaggtaattgccgtcggggccgaagtggttgtagacgacatccaggaggaccgagatcccgcgctcgtgcgcggcatcgaccagcggcatcaagtgctccggcctgccatagctgctgtcgggcgcatagggcagcacgccgtcgtagccccagccataccgtcccggaaaatcggcaaccggcatcagctggatcgccgttacgcccagccgcgcgaggtgatcgagacgcctgattgccgcgaggaaggtgccctcctcggtgaaggtgccgacgtgcagctcgtagagcacggtctcttcccacgggcgcccaagccaggcttcggtcttccaccgataacgcgcgagatcgacgacttcactgaaaccgtgcacgtcctgcggctgaaacagtgatgccggatcgggcacgtgcaacccatctgggagaacaaatcggtaggacgtgccggcagcggcgccggcaacctcgagttcgtgccatccatccgcgccttgatgcatcggctgcggctcatgaccgtccagcttcaaagcgacgctgtcgacaagaggagcccacaggcggaaggtgacgcctgtgtcggagatgacgggtccgaatttcatatcagtcacacgaggcctttcggtaaaatcggatcggcagcccaacgtggttgccgcgcaaaagtttgcgtcgttgcgatcatgattggtcacgacggcgtcataggtgccgtccggcgggtccgtcgttctgcaagagcgcgaccggttgcgtccccagtagctgcgtcacgggaaccgacgccgtggcgtcgatgggcctttgcgtcaggagatcgtgtgtcggaccgcgcagctccgaaggcagcatgaccacggtgtcgccccagaattcggggcctgcatagagcttgcccggctccagctgccccagcatcatgcgcggtgtcaccgtgaccgtgaaggcatcgtccagtcgtcggccgaacgcgacgacatggttgctgcggcttcccgtgaccgatagcggcaggtaatcaccgttggcgaacagagcaggcaggcgtttgcgcagattgaggccaatgccgatcatgcgctgcttcagggctggaacggtcagctcagagatcgtctctcgcgttgccagcatgcgggccagcgccttggtgtcgatcgggcgccggttgtcgggatcgacgagactgaagtcgcaggcttccgatccttgatagatgtcgggcacgccgggcgccgtcagcttgatcagtgtctgcgacaggctgttcagatatccggcggccgccacaggccggagcgcttcggcgaagtcctcgtggaaggtcaggctggcggaggcggtcagcgccgccgcatagtttctgaccgccgtctcatagtgctcgtgcggctcgttccagtttgtcgcgagcttggcttcccgtacggccttttcagcataggcgacgaaacgatccgtcaggcctgcggcggcgccgtcgcgaaactcctcgggccatatgcccgcaagcgcctggtagagcatccattcgacattcgcgtcgggcgtcaggcccgccggcaactcggtcaggtggttgcggttcatgtctcgccagcgctcgacgccgagccgccacacatcaggctcctcgctcagcgcgtagaggcgggcgcgggcgtcttcgccgcgcttggtgtcgtgggtggaggtggccgacagcccgtgcggctgaagctttgccctttgctgcatcaatgcgtgaaacgcatcgacgccgcccggcgaccggtcgggctcgccgccgacctcgttggcgccaagcaggagattgtggcggtaaaacagcgtgtcttccatggccttggccatgatgggcccgctcagctgctggaagcgccgctggaactcctcggcgcgggcgtcgccatcgaaaagccccgccacggcttgcaacgcatcgctgtctccgctctgccctgccgcttgatcaacggccgcctcaatgagccggcgatcactgtcggacagttttccctcgcggccataggtgcggtagaagggaaacgcgacgagcaattccctgatcgccgccgaaagccgcttttggtcgacatcagccagaagcgaatgcgcgattgccaccagtcggctcgtctcgccttctaagttgcgatcgatcatcagcagcttggcctcgcgcaggccagccgcgaaatcggcggcatccggcgagagactggcataggcatcaccaagctgccgcatgccatcgggatcgataaagagattgctcagcgccgagatgaactcgtaaccggtcgtgccctcgatcggccagtcggcgggcagtgtctcgccatgcccgacaatcttctccgcaacgatatagatatcggagccaacggccgcgcgcagtcgatcgagatagcccgcgggatcggcgagaccgtctatatgatcgagccgcagcccctgcacgtagccagcgcggatcaggtcgagcacgagcgcatggctgtcggcaaacacctgctcgtcctcgacacgcaggccgacgagccctgtgacctcgaagaagcgccggtagctaagcgtcttggccgcatcctgccagaacgtcagccgccagggttgctgatcgtggatgctcgatatcagcgactgatccttcagatccccgaatatccggccggtgcttcccggattgagcggcagccgggtctcgaaataggcaagcgaccactcttgggtccgtgcatcgcgctgcaactcgaattcgttgtcggctagggcgtcttcgaaggtctttcccaatatcggcagcgtcagccgctggctccagtcgatatcgaaatggcctgcatatttgctgtccgcgccgaatttaaggacatccgcccaccaggcattttccgtggaggcggccatgtggttcggcacgatatcgaggatcaggccaagaccgtcggccttcagcgcagcgctcagtcgctcgaagccgtcggggccaccgatcgcgggatcgatctcgttgcagtcggtgacgtcgtaaccatgcgttgatccggaggtggcggtgaagatcggggaggcataaagatggctgacgccgagcgatttcagataggggatgaaatcgatggcggtgtcgaatgtcattccatctcgaaactgcaacctgtaggtcgatgtcggtatcgtcatgtgccgcctctggtgggatcgcgacactgcaacagcgccagcgcgtcttttgttcctcaatttccgccacgatcatcgcgaagcgggaatctcagcgtgatcagcaatggcagatgatcggaggcgcgccttgccagcggcgtggcgatgacgtcggcggtgctcaccgtcaggtcgtcggacaaaaacacgtggtcgatccgcagcaacggaaaacgcgatggaaaggttggcctcggccgtcgcgtcccgctcaactgcgcgtcgcggaaccggccggccagcatcctgtaggccggcgatgatggccacgcgttgaggtcgccgcagacgagtgatggtgccgtgttaaaatccgggctcccgatccactcgtccgagagcagtgtctgcacctgcctgacgcggtcgatgttgcgcaggccgagatgggtgttgagcacgttgagcttgcgtccaccgatgtccacctgcgtccagatcgcgccacgcgtctcaccgatcgagggcagggggccggccttcatcagctgtgtgggaaaggcggtcaggatcgcgtctccatacttctcctcccgcacatgaagcgccgggtgaaaatgggcctccatcttcaaaagcgtcgcgatcaagtgcgcctgatcgatgccgccggttcgcttgcgcccgacatcgagctcctgaagcgcgatgatgtcggcgccggattgggcgatcacatcggcgatcctgccgggatcgagatgccggtcggtgccgatgcagctgtgcacattgtaggtgaggactttcagttcccggtcttcaggttcgtgcgaagtgtctgtcgatgcgctcatcgacagggaacccgatttcatcctgtttcgttccattgctggaagatcaacgaaatggaatgttcatgtcggcgaagcgtgtcctcatcaatgcaaccctggttctcggactgctgctcgcggcctacctcctctacaaggttttcagtcgctactcgatcgatgagattacacgctcgatcgtcgccattccggtctcgcggctgctttccgggttgggtttcgcagcactatcctatctctgcctgacgggcttcgattggatgggattgcgctatgccggcaagccgttgcgctatccgaaagcggcgctcgcctccttcacggctctctccattggccacaatctcggcgtggccgcgttgagcagcggcgcggttcgctatcgctattatgcgcgatggggcttgagcgccgaggaagtggcgaaggtcattctgttttgtggtgtcacggttggcatcgggctgtcggtgctttcaggactggcgcttctgatcaatccgcgcgatgcggcgaacctgcttgccatgagcgccgatggcctgttcgtgctgggtctcgcctgcctcgccgtccccctggcctatgtcgttctcgccgcgaccgttcgggcgccgctgcgcctgtggaagtggagcttcgagatgccgcgcgtcgaactggcgatcggccaggtcgtcatcggcacgctgaacttcgtcttcgtcgccgccagccttcatcagatgctggcggcgcagggcgatgtcagcttcgtgcagacggcaacggctttcgtgctcgccaacatcgcgatcctcctcacccatgtgccgggaggtctgggcgttctggaggcaaccgtcagccatgtcctgccgggcgcggcgtcgatcggtgcgctcgtggcgtttcgggtgatctatttcatcctgccgctgttgatcggcattgtcattttcgccatcagtgaagtggtgctgcgcaagcgcggcaaggccgcatcagaagatcgcggcggccagccgtccgacgcgcaggcgcagcttctgtagcggccagtagggacgtcgggggtcaacgagtgttgtacccgtcagcggcgacgtctcgcctttcgagacgtcgatggcgaagtgccgcagcccgcgcttgccgacattcagtgcttccactgcggcattcagagagcgcatgctcagttcggtctcgcgcacggtctccggcgtcgtgtccagatgctcggccagcagccggtagcgcagcgtcgaaatggcggtgcgatgcgcatcggtcgaggcctcgatcgccagatcgcattccgtatccaaaccctccgaccggttgttcaggttggacgaaccgatgcggatgaagtggtcgtcaacgatcagcagcttggagtgaatgaccaactccttctcgccgcccttcttgtcggggaccacggcatacatgacgcgcagcctatcatagtggtcgatgcgcttcagacggcggatcagcctgtcccgattgttgcccatcgtcagcttttcgagaaagccgtgggagctcttggtgacaagtacggtgatctcgggaccatcactttctttcagtcgcttggcgatggtgcgcgccacgccgaaagaagccagatactgagtctcgatgtaaatcagcctgcgcgcggccttgatcgcgtcgcgcgtcagccggaatgcctcgtagtggccgcgcttcccgatcaggccgggctccgtcagcgcgatggcggcggtcgcgttcgcaaggtcgggagtgacgcctgccggccatgaggcgccgcccgccggggatggcgccgggcgctcgccggtggcgcgcttccatcgtctgcgcgcgacatcgccgatcaaccgcgccgcgtcgcccgataccatcgactgcatgtcgtggacgggatcatagggggtaccatccggcgacttccgcagcgtgtttgtcatcttgtggtccggctcgtcccagcgcctggcggtcaggtcgatgccgccgagaaaggccaggccgtcgtcgatcgagacaagtttctgatgatggcatccgcggatcgggtggcgcagatcgaaacgcatgctgatctgcggatgggaggagaattcgctttcgcggaagagacgcaacgatttgccggagtagatcggccccattccccataccagtatgcggatacgaagatccggcttctcatcggcgagcgacaggagaagctcgcccagcgtctcagaactctgatgagggcgcagcctgatatccgggttgaagtcccagccgacgatccagatcgtatgaaccgccttgcgaagggcttgatcgagcgccagaaagtaggcggcgccatcgatcaggaaggccgccttgtcgacctggccgacctgccacgcgttgcgtcgctggcgaatgataccgccgggcaaggcgggaagagaagcttcttttctgcgggttgctcgtttcaggaattcggttgcctttgacgccttgcggcgatcggcgatgggttgaaactctgtcattctgctgtccggcgccccgcttggtatttaacctggccgtaacgctcgaatgcatgagttgttccatcgtggtgcacggcattttcgaggccggcgccggaccgccgcacggcgcggaagccgggcgcggaacgaaaagccgtttcaattgtttacttcacggtaaaggatgagccgaggagtgagattatgatcagaactatactattggtaacagcggtcgcgggcggtctggcatcgtgcacagccaccgaacaaggcacggcgatcggcgcggggaccggtgccgtcatcggtggcgtggccaccaatagctggggtggtgctgccgtcggcgccgtggcgggcggcgtggccggtgctctgatcgggcagtcgcaggaacgtcgcggctactgtgtctaccgcgaccgctatggccgcacctacgaggcgcgttgccgctaagcgctccatccggagagaaataacaatcgacgtgcgtgatgcctcgccggtatcgcgtgcgccgaattatgactgatcggcgcgaacatcgcccccgcgccatgatgcggacccattcttttgctgatgagaacccatcggcaacgcgtcttgggcgagcgcatgaactggataaatcgttatatcgatgaaccgctgctgcagggtgcggcaacggtcatgaaactctggcatggccgtaccggtcagcggccggaccttctcgagccggtgtggaaccttctttccatcgcttttctgctgatcgcgggcctgcagttgctcgcgggcgaggtgctgtggctgagcgaggcggcgctcgtgatgctcgcgctgccatcggtgctgacgctgtacaaggcgagcgctgcttcggccgactacgacttgaaagactacaaggcattgcgggccaccgctttgcagaagcgcgaaaacgaatgggcgttgcggctcgcggtcgtcgtcggggcgttggtcctgccgctcgccaggcccgtcgacgatgtcgcgagcgcctatttcatgctcggcgcatgcctctggttttcgctgacggcgccagcgagattctatttgaacgcggccgagccgccgacgcctgacgagggcgatcgacttttccgacctgcgctcggctcggcggcgtaagctcataaccgatcaatcgcagatcgcttccgcctcgatctccacctcgtagtcgccgaccagattgccggcttcgatcagggtgttggcggggagaaccgaggcgaaggcgcgtccgtgcgcgcgcgacaccggctcccattggctggcatcgcgcagatagatgcgggtcctgacgacgtcttccatcttgccgccgagcgccgagatggaagcggcgatcttgtcgaggatgtaggtcgcctgcgcgcccgcatcgcctgatgctacgcagcggttcgtgccatgcgtcgcggtcgtgccggaaacgagaatgcggtcccccaccctgacggcgcggctgtagccggcgatcggctcccagatgcttccggaagagactcgcgaacggcctggacgaccgggcacgggttgagccgtgtagatggacggaatggcatccagatggtggctgagatcgccggatgcggtgaggaatggcggcttgcggtattcgtcgccgcaatcgccaggaatgggttgcgtcttggcgaaggcggcgttcagtgcggcgtgatcctcttcgtcgagcgcgaaggagaagacgttcagattgtcgccgcgatgctcgttttcgccgatccgcgcgccgactatggtggcggcgacggcgtcgtgttccagaacccagcggctcgcgacgttggagatcgacacgccatgcttggcggcgatggccgcggcggcgccgagaatgccctggaagccttcccagccgccggcggcgtcgatgaagcgcttgtacttcgagcggctccagtcggcgatcgatgtcggttccggctggcccagccacttctcggagaggaatccgccgcagagcgtcccataggcgagaagtttgacgccgctttcggcgcagagcttcgagagcgcgcccgcggcgcggcggtcgacgagcgagaacgagacctgattgctggcgatctcgatgccatcggcgagcgcaagcgccagatgtccggcatcgaaattggtgaggccaagcgcgccgatcaggccttcctcgcgcaggcgctgcatctcgtgcagggcgtcgagccatgccggatgctcgaaactccaccagtggaattgcaggagatcgaccttgtcgacgccaagcctagtcagccgctcctcgacgccgcggcgcacgacgtcagccgtcatcggtcccggctccgggcaccacttggtgaaggcgaccggccgctggccattctgaaagcgcgacagcagtcgccccgtgatcagttccgccgagccgtagtgatcggccatgtcgaacgtgtcgaaaccatctcgcgcataggcctgcagcacatctgcgcccctatcgggatcgatcagcgtgccgttcttctcgatgtcggccacctgccagagaccgcagacgatacggctgatggagagatccttggtgagcgctatgcgtggaggcgtggtggacatggttctattccctggatgtctgtttgcgcttgcccgtcaacgaagcgagctcgttggaggcgccgagaatgccgcgcgggcgcaggagcaggatgaggcagagcccgacgccgatcatgacgatctgcagcgatgccgcgcgggcctgctgttcgggcggcacgaaggcggagacggcggcggccgacagcgcccacagaccccagaccataaccgcgccaagaatggcgccgcgattgttgccggagccgccgacgatcagcatcgcccagacctggaaggtcaggatcggcagatagttgtcgggcgcgatgaagccgatgaaatgcccttgcgcggcacccgccagccccatgatggcgccgccgatggtgaaggcctgcagacgaaagcggatcggtcgcttgccgagcgcctgcgccgcgctctcatcctcgcggatcgcgcgcagcacgcggccccagggactcctggcgagatgctgtagcgccagatagagcgcgagtaccacgcccgccatcagcgcgaggtttgaaagggaaaatgccagcggatcaccggcaaggttgccgaacgggcgcggaatgaagccgataccgaaggcgcctccggtcagcggctgcaggttgagcacgcagagctgcaccgtgaccgccacgccgaaggtggcgatggcgaggtaatcggatcgtagccgaatggtcagcgcgccgaccagccaggcggcaagccccgcgaacagcgcgccgccgagccagccgatggcgatcggcatgtcgaaaccgccgaagcggccgggcgcatccggcgtcgtcaagagcgcggatgcgtaagcgccgatcgcgacgaaggcggcaatgccgacgttgaagagaccggtctggccccactgcacattgaggccgaggcacatgatggcgtaggtgagcgccatggtgaggaagaaggcggcgtaggcgatcagatcaaggctcatgccgctctcccgaacaggccgcgcgggcgaagaagcaagaccgccaccaggatgacgaacgaaacagccgcccgccactcggcgccgacgatctgcacggccgccgcttccgacaggccgacgatcaggcccgcgatcatcgcgccgggaacgctgccgatcccgccgaggatcgcggcggcgaacaacggcagcagcaggtcatggccgagataggggcggatctgcacgaggagcccggtcatgatgccggcgatgcaggcaagggcggcgccaacgaaccagacgacgcggatcacacggcgcacgtccacgcccgcgatgcccgccaaagccggattttcgctgacggcgcgcatcgagcggccgatatcggtgcgggtcatcagcaggtggatggcgacgaccgcgaccacggacaggccaagcgacaggagctgatcgggcgtggcacgcaggccgccgccgatcttcacggcgatctgcagcgccttggtgtaataggccggcttcgaggtgaagatgaattcgagcaggctgcgcagcgcaagcgaggcaccgaagcttgccatgaccaggatgatgatcgcgccgccgcgcgcccgcagtcgcccgaacagaaccgcgtccaccgcgagcgccagcaggcccgtgagcaggattgaaacgatggcggcgagcggcaacgaccagccgaaggagaaggggccgatcggcttcgtcaacattgtcgacaggagcccgaggccgccgctgacggcgagagccagataggcgccccaggaaagcatctcgccatgcgcgaaattggcgaagcgcaggatcgaataggtgagcgtgacgccgatggcgccaaggccgatcatcgcgcctgcgaccaaaccgtccatgagaaattgcgggttcatggtgcctccgacgcctgcttgctggtgccgagatagagcttggcgatcagcgggtcgccgagcagcgaggaggcctcgccctcatgcctgatcctgccttcgaccaggatgacggcgcggctggcgatcgccagcgctgccttgacgttctgctcgacgagaatgacggtaacgccggcggcgttgatctccttcagcatcgaaaacacctcgccgacgatcttcggcgacaggccggccgagggttcatcgaggatgagcacggcgggatcgacgatcagcgcgcgggcgacggccagcatctgtcgttgcccgcccgacaacgcgccggcaaggcgcgagggcttgctggcgagatcgggaaagcggcgatagagcgcggcgatccgttcggctcgctgcgccttcggcaggacagctgcggcaagttgcaggttttcgtggatggtcaacgtcgcgaagatgttttccgtctgcggcacgaaggcgaggccttcgccgatcttgcggtgggacgcgacgcgggtgatctctcgctcgcccagcatgacgcttcccgagtggatcggcacaacgccggcgatggctttgacgagagtcgacttcccggcgccgttcggcccgagcaacaccagcagctctccaggcgccaccgagagatcgacgccgcgcacgatcggcaggtcgggttcgtagccggcgaccagcgcgcgggtttgaagcgccgacgcggtcatgccgccgctcccagataggcttcgatgacatcggggttggaggcgacgtcggcaggcgtgccctcggccagcggcttgccgagcgccatggcgacgacacgggtacagaggcgcgacaccatatccatgttgtgctcgatcagcaggatcgacttgccctgcgcattgagctccagcacgcgttccatgatcgtttccagaagcgccggattgacgccggccgcgggttcgtcaagcaggatcgcctgcggatcggccatcagtatccgcgccagttccaaaagcttgcgctgtccacccgagagaaccttcgctggttgcccctcgagacccgacaaggtgacgaactccagcagcgcgcgcgccttctcgattgccagccgctcctgctgtctgacatggccgaagcgcaggaaattcgcgaacagccgctcgccgtcctgcacctgcgcgccgacgagcacattctccaggacagtcatttcgagaaacggcttcgggatctgaaaggtgcggccgacaccgcggccaattctctgttccgggctttcctgcgatacctcgcggccaccgatccagatctcacccgatgtcggtttgagacttccggcgatcagattgaacagcgtcgtcttgccggcgccgttcgggccgatgaggccgaccatctcgccttcgccaagcctgagcgacatgccgccgacggccacattgccctgaaacgacttcaccagttcacgcgcgtcgatcacggctctggcgggttctgccgctttcgatggggcgtctggcactggcaaaggcatggaggaaagaagtctcttgatttgattggtgatgtttgatcaaacttcaccccatggtgaaaagcaaccgaaaaaagcggcataccccggagcaggctggatggtagtccaagcgggaggagcccaggtgaggagaaccgccgatggtgggccgggcggtcacgatcgtgatgacgcgctgtcgccggtcgggcgcgagacgctgcaggaccgtgtctacgcccagcttcgcaactcgctgatcaacgggatgttcgacgcgggcgacgtattgcgcatcgtcgatctcgccgagcggctgcaaaccagcaccatgccggtgcgcgaggcgcttggccgtctcgtgtccgaacaggcgctggaatcgctgcccaatcgctcggtgcgcgtgccgctgatcacccgcgaacgtctcgacgatctcgcccgcgcccgcatcctgatcgagggccagatggtggcgctcgcgctgcccaatctgacggacgccgacttcgcggtgttgaagcaggtcaatgtcgattgcgacctggctttcgagcagcatggcaaggacatcggccatgtcacctcggcgctgaaccagcagttccatttccacatctatcacgcggcgcgctcgcaggtgctgatcccgatcgtcgagagcctttggctgcaatcgggcgcgatcattcgcaaggccgcgcatattcacgacgaacagggcggacttgccgccaccaatcatcactgggcgctgatcgatgcgctggaaaagcgcgatgtcgaggccgcgatgcaatcgctctccaacgacatcagccgttccttcgatctgatccgcgggcggctggatgccgagcctgaaggcgacgcgtcgggagaccatcatggctgaacccatcgacgacggcttcgatcttttcgatctcagggtcgacgtgatcattcccgagggcggcgcggtctactgcggcgccaagccgggcgatcatttcgagctcaaaggcgagatgctgcacctgccggaagggcaggggatttcgatctactcgctctcctccgtgttgccgctgctcgcggcaaagcagcgcccgacggatcgcaacgactggatgacgacggacgccgacatcgcttgcccggacccgaattgctcgacacggctgaggatcactcgcacgggtatccgccgtttcagccatgccgccaccacggcggttcccttgaatgacgaataggccgaaagatatgcagcgcatcaccatcgcccccggttacgaaatctcccgcgtcattcgcggcggctggcagctggctggcgggcacggtacgatcgatggcgacagcgccgtcgaggacatgatcgcattcgccgatgccggcattaccaccttcgactgcgccgacatctatacaggtgtcgaggaactgatcggccgcttccgcgtcgcctacaggaacctgcgcggcgccgaggccctgtcgcgcatccgcgtccacaccaagttcgtgcccgatctcacggtcctgccaaacatcagcaaggcctatgtcgaaggcgtcatcgatacctcgcgcaagcggctcaatctcgattgcctcgatctcgtgcagttccactggtgggcctatgacatcgagggctggctggagacggcaggctggctgaaggagctgcatgaggccggcaagatcggcaagatcagcggcaccaatttcgacacggatcatatcgaggcgatcattggctcgggagtgcctttcacctcgctgcagctgcaatattcgcttctcgaccggcgcccggaaaagcgcatggtggcgcttgcggccgagaagaacttcgcgctgttctgctacggcaccgtggccggcggtttcctcggcgatcgctggctcggccaaaaggagccggagcacccgctcgaaaaccgatcgctgacgaagtacaagctgatcatcgacgatttcggcggttgggagctgttccaggcgctgctatcgacgctgcgcgggatcgccgaccggcacgacaccgatatcgccaccatcgccagcgccgccatgctgaccaagcctggcgtcgcggccgtcatcgtcggcgcccgcaacagggatcacttgcagtccaatctcgccatcgccgacatcgtgctcagccaaacggatagagccgagatcgatgcgatcctcgcgcaatcaaggccgctcgacggcgacgtctatacgctggagcgggaccgggaaggccgccacggcagcatcatgaagtacaatctcaacaaaggggaacaaaaatgagaacgacattcctgctttccgccatggtcgctgcccttgcggcgtccacggcgccgacgttcgcggccgattgcgacatcaccgtcggcctcgtcatggaactgaccggcccggccggcgaatatggccaggcgggcgccaagtccgtcgagatggctttccgcgatatcaacgatgccggtggcgtcaatggttgcaagatcgttgcggacacgcgcgacagccagagccagggcaacgtcgctgtcgatcaggcgacccagctcgtcaacatcaagaaggtgccggtcgtcatcggcggcatcatctcgtcggtctctatcccgatcctgacatcggtgacggcgccggcaggcgtcgtgcaggtctcgcccgcatcctcttctccgacgctgaccgagcttggccgcagcggcaagaccaacggcgtcttcttccgcaccatcacgtccgatgcgctgcagggcacggcggccgcgaagttcgcgatcgatcagggcctgaagaagatcgcgatcatcaacgtcaacaacgacttcggcgtcaacatggtcaaggagttttcgaccgcgtaccagaagctcggcggcacgatcacctcgaccacgccctataacgagaagcagtcgagctatgcctcggaagccagcgccgccatggccggtgatcccgatgcgctctatctcgtcagcacccccgtcgacggcgccaccattgcccgcgcctgggtttccggcggcggcaagcagaccttcctgttgaacgacggcatgaactccaaggacttcatcgaaagcgtcggggcgcagtatctggagaatgcctacggcacctcctcgggcaccagcccgacggcgtccacggaatatttcaatggcaactacgaagccttctccggcggcatctcgccgtcggcgccggccgccgaccgctcctatgacgccggcgcgatcgtggcgctggcgatcgccaaggccggcaaggccgacgcggccgccatcaaggcagcgatgcccgaggtcgtcgccgagggcggcacgcccatttacgccggcaaggccgagttcgccaaggcgctgcagctcatcaaggatggcaagccggtgaagtacgagggcgtcatcgggcccgtcagcttcgacaagtatggcgatatcaccggtccgttccgcttgtggaagatcaccaatggcgaagtgaccacgctcggcgagctgagcgccgaagaagtgaccaagatcaaggccgcgcaataatgcgtcaggcgacatgggagctgtgctcccatgtcgcaccagtctggtctgggcgcacagatgatttgttgggtaaacagcgtcgttcgcgggtcgcgccgtgcaagacgacgaggccgggtctcgtgtgacagccgcgcgatccatcggcaaccggaaccacaacgacagaccatcgacacatgaaaaaacgtccaatcctcctatcgatctgttcgatcaccagcctgctcgtcatgacatccacggtatccgcacaggatctggagaatggacgacgggccttccggtcctgtgcctcctgtcactcggtcgattcagagcgcagcggcttcggcccgtatctcaaaggtgtcgtcggtcgtcccgcgggcagcttgtccggatatagatattccgaggcgatgaaagcggccggcgccggcgggcttgtctgggacgaggcggcgctggcggaattcctctccagcccgaaaaagaaagtgccgggcacgaagatgagcttcggcggcctctggacgacttcggaaattgacgacctgatcggctacctgcgagccaatccataaacgcgccgaatgtcggttcgtcatggcttgacgtcttggcgcctgatcgcctaagtctcattcgatggttcccgaagggatgacttccgacgggattaatagggaacacggtgcggatgacccgaatggggccaagaccgtggctgcccccgcaactgtaagcggattgcctgatgtcctcgtggtgttcttctggagcaccatgccactgcgaaagctcttcgtgggaaggcagatgtcaggcgcatatccgcaagccaggagacctgccgtcaaaacagtgtccaccatcccggacggggttgtccggagaggagcatcatatgatggtttttgacgtcaaccgctggcgcggtcccgctttattcccctccgtaactctcatgtccgtgatcccgagatagcgttcgccgccgcacgatatcgagcgagcgctttgctgtgtcgttccgcatcgttcgcggcggtccccgcttcgagtttcacagccgcagccagtgggctgcgggcttcagccatacatgaggaccaacatgaaccgcatcatcctgcgaaccgcgctgctttcgatcgcgacggcttgcactttcacgacctttctcccgtccgcccaggccgcggcgacgacctatcccttgacgatcaccaattgcggtcagcaggtgacattcgacagcgcgccgaagaaaacggtgtcgatcggccagggcatgaccgaaattctctactcgctcggccttgccgacaaggtggtggggacggcggtctgggtcggaccggtgctgcccgcctatgccgaggtcaacaaggggatcaagcgactggcagacaacgatccgagttttgaatccgtcgtcggccaggagccggatctcgtcgcggctgagttcgaatggcacgtcggcacgcaagggtcggtcggcaagcgcgagcagttcgccggtcttggcatcaagacctacgtttctccggccgattgcgtcgcgaagaccaatacgaatggcggcgacggcgtgcgtagcgaactcttcacgatggagctgatctatcgggaaatcgccgaactggctgagatctacgacgtccaggatcgcggctcagccctgattgataccttgaagaagcgcgaggcggatgccgctgcgtcgctcggcgggtcggcaaaggatctgccgatcgctttctggttctccagcaaggaagtggcgggtgatgccttcatcgccggcaagaacagcgctcccgcctatattctgaagatgctcggcgcccgcaacgtcgtcagcaccgaggaagagtggccgctggtcggctgggaaacgatcgcgcaggccaatccggcggtcatcgtcatcgccaacatggaccgccgtcgctacaccgcggacgatcccaaggcgaagatcgattttctggaaaaggacccggtcacgagccagctcgacgcggtgaagaacaggcgtttcgtcgagatggatgcgcagtcgatgaacccgacgatccgcaccattgatggcctggaaggcctggccgcgggcatcaagtccttcggtctcgccaagtgaggcacgcgtcgataacccaccggggatggggaacgctgctgcttctcttcgctattgccgccgcggcattgggccttgtcatcagtctcgccgtgtcgatcggcgagattcccattccggtcgccacgacggccaaggccgtggcgaaccgtgtattcggcaccggctttgaactgagccgcatccatgaaggcatcatctgggactatcggctgagccgcgcgcttgtcgccgcaagcgccggcgcggccttggcgctatgcggcgcggtgctgcaggcgctgttgcgcaatccgctggccgagccctatgtgctcggcatctccgccggcgcgtccaccggagcggtcgccgtcatgatcctcggtttcggctacggggtcctgacgctttcggccggcgccttcgtcggcgctgtcgccgcgttcctgctggtctcgttgctcgccgccggctccggcggcgggactgaccgcatcatcctggccggcgtcgccggctcacagcttttcaacgcgttgacgtcctatatcgtcacgacgtcggccaatgccgagcaggcgcgcggtgtcatgttctggcttctcggcagtctcgcgggcgtgcgttggccggatgtctatctcgccgcccctgtcgcgatcggcggcttcctcgtctgcatgctctacgcccgcgcgctcgatgcgttcaccttcggcaccgatgcggcggcggcgctcggcattccggtcgccggcatcaggatcgcactgctagctctcaccgcgttgttgacggcaacgatggtcagcatcgtcggctcgatcggctttgtcggcctcgtcattccgcatgcggcgcgcttcgtggtcgggccggggcatggacgcttgttgccggcaacggcgatatccggcgccatcttcatggtggtcgccgatatcgtctcgcgcgtcatcgtcccgcagcaggtgctgccgatcggcgtggtcaccgcgctcttcggcgcgccggcattcgcgctcattctctacaaggcgaggcgacccgcatgagcatttccatcagcgacgtgtattgggcaacgtcaggcgtgcttgtcgtcaagggcgtgagcctcgaggtgccaactggccagacgcttggcctgatcgggccgaacggttccggaaaatccagcctgctgcgattgatcggcgggctgcgcaaggtcaagagcggcgtcattacgctcggtgataccggcatcgagacgatgccacgtcgcgatatcgccaagcgcgtcgcctttgtcgagcagcaagccacgaccgagacgcaggtgacggtgaccgaggtcgtgcgtctcggacgtacaccccatcgtggtccgctggcgccttggagcactgttgacgaagaggcggtggacaacgcgctgcggcaggtaggcatgctcggaaaagcacggcagctctggcacacgctgtcgggcggcgagcgtcagcgcgttcatatcgcgcgcgccctggcgcagacgccgagcgagcttctgctcgacgagccgaccaatcatctcgacattcagcatcagctcgaaatcctgtcgctggtctcgaaactgccgatcaccagcatcgtcgcgcttcatgatctgaacctcgccgccatgttctgcgacaggattgccgtgctcagccagggtcggcttgtcgcggtcggcccggcggacgaggtgctgacggaggagctgatcgccgacgtgttcggggtgcgcgcccatatcgagcgttcgccgcatcacgggcggcaacatattcattttcttgactgcatttcttgaggttcgatgtccatcagacaaaccaacttcgatctgaaggaagagatccgggagtattggtccaagcgttcgcagactttcgatcttgccttcggtcacaggataccgcgtggcccggagttcgatgcctggcagcagccgatgcgcgatcacctggggccgacgcctttgcgtgtcctcgaactcgcctgcgggaccggcgaggttacggcgctgatccacgatctcggccatgatgtgaccgcgctggatttttccgaggcgatgctgtccgtcgcgaatgccaagcatgccggcaaggaccggctgcgtttcgtgctcgccgacgcggaaaacccgatggagccggacgcctgctacgacgccatcatttgccggcatctggtctggacgctgaccgatcccgcaaaggcgttcggcgagtggcatcgggtgttgaagccgggcggcacgctgctggtgttcgacggcgattgggcgaagccgacgcggctcggccgcgctgcggcatggctcatccgccggatcgatcgtttctgcggcgcggaccgccattatgatggcgcgatgagcgagcgccattcggcgatcatgtccgcgctccccttcggcgccgggctgcggccggatgatctcattccgcaattgaagcaggccggcttcgtggacttcgagatttcgtcgcatggcccgatagccaaggcgcagcgacgtggcgccaatctgcgcaacaagctcagaacgctggtctaccggcgcttcattctcgtcgccaaatccgctggcgcctcgcacggtggcgaggcctgatctatcgccaaaaggcggtcgaattggtgccgtcggcgaattttgcggcgtcttgtcatcggagcatgttgacgtgatcggctggactgggtcatctgcggataacggcatggcgctcatgcttgcggtgatcggcacgggaggccgctaactgtctcgaacggccgagcgccggcagtctcaagggaggaatacacctgtcagccagcccgatcggatcgggatgggctgaaacccttgaacgctaggactcccgcaatggcatacagcacgacgatcgaacgaacgcgtttcggctttcgcgatctcaaggacctcctcgcgaaagcgacgccggaacgttccggcgaccaactcgccggcatcgcggcaagcgggccggtcgagcggctcgcggcgcagatggcgcttgccgatctgccgctgaaggcgtttttggctgacgaggttatcccgtcggagagtgatgaggtctccgcgctgatcgccaggcagttcgacgccaaagccttcgcgctgatcagctcgttcacggtgggtgagtttcgcgagtggctgctgaagcctgaaaccgatcagcgggtactcgaagcgatcacctatggcatcacgccggagatgctggccgctgtttccaagatcatgcggctgcaggatctgatcgccgtcgccgccaagcggcaggtcgtcacgcgctttcgcaacacgctcggcctgaccggccgattgtcgacccgcaaccagccgaaccatccgaccgacgatagccgcggcattgccgcctcggcgatcgatggtcttctgatgggctccggcgacgccgtgatcggcgtcaatccggcgaccgacagtgtcgaggattatgtgcggatcgtttcgctgctcgacgagatccgcgagcggctcgccatacccacgcaaacatgctgtctcgggcatgttaccacggccattcgcgcggtcgaggcgcgtgcgccggttgatctgatgttccagtcggtcgcgggatcgcagaaggccaatgaaggcttcggcatcgatctcgcgctgttgaaggaggcgcaggatgccgggcgatcgctgaagcgcggcatgccgggcgccaatctgatgtatttcgaaaccgggcagggggcagcactttcggccgacgcccatttcggcgtcgaccagcagacgatggagacgagggcctatgccgtcgcgcgtgagttcgatccgctgctggtcaatacggtcgtcggcttcatcgggcccgaatatctcttcaacggaaagcagatcatccgcgccggcatcgaggaccatttctgcggcaaactgctcggcctgccgatgggtgtcgacgtttgctacacgaaccatgccgatgccgaccaggaagacatggacacgctgttgacgctgctttgcgcggcaaacgtcaatttcgtcatcacggtgcctggtgccgacgacatcatgctgaactaccagtcgctgtcccaccacgacgccgtgttctgccgcgagacccttgggcgcccgccggcgccggagttcgaggcgtggcttcgcgacgtgggactgaccaatgaagccggggcgctgtcgggtgcgcctgccatgctgaccgattacttgtcgagggccgctcttgtctaagtccgacgccgccgaactcagaaccgattgccagccagccaccgtcgatctcaccgagatgaccgatgcgcgcgtcgcactcgggcgtttcggatcgggcgcgccgaccagggcgcaactggccttcctgcttgatcatgcccgcgcccgcgaagcggtatggtctaccgtcgacgagaacaggctgaagagcgatctagaggcgctcgggctggatgtcgtctcggtggaaagcatggccgaggatcgcggcagctatttgcgccggccggatctcggccgcaaattgtcgcgcgcctcggtcgagcgtctcgccgccttgccggctgacgccaaggggtgcgacgttgtgatcaccattgccgatggtctgtcgtcgagcgcagtggacatcaatgcagtcgcgctcgtgcgcgagctttcgaggcttctgaccagtgccggcttgtcgatcggacctgttgccgtcgcccgccaggcgcgggtggcgctcgcagacgaggtcggcgaaattctcggtacacggatgacgatcgtgctgatcggagagaggcccggtctctccgcggccgatagtctcggcgcctacatcacctacgagccgtcggccggtacgccggattcccggcgcaactgcgtctcgaacatgcgcgagggcggcctctcgatggaacaggcggcgaagaccatcgccggtctcgtcgccgacatgacgaaaacaggtgtcagcggcgttggcctgaaggaagcgctggccaggctccccggcgcttcgtaacagacttcaccggatgccggcccgtgcgcggggtcgcgtgtcgttgcgctcgtgctcgaagatggcgccgggaagcggcagcttgccgcgaacgatgtccgagcccttctcgccgaccatgatggtcggagcgttggtgttgcaggagggaacgcgcggcatgacggaggaatcgcagacacgcaggccttccagcccgtgcaccttgagatcgagcccgacgaccgcgtctgcgcccgtgcccatcttgcaggttccgacggggtgatggtcggtcttggcgttggcgcaaccatagtcgaagagttcgtcgtcggtcatcaccttcggcccgggaagccgctcggccagcacgaagggcttcagcgccgcctgctgcatgatctcgcgcgcgatcttcagcccttccagcgacattgcccggtcatgtggatcggaccagtagttcggatcgatgagcggggctgccgccggatcggatgacttgagcctgacggtgccgcgcgagcggggatggagataggccgagttcagcgtcacgccggcgttcttcagccgctccacgcccgcctcgatgccggagccgaggccgaggtggaactgaatgtcgggggaacgcgcattcgggtccgcataccagaagccgcccgtctcgaagagcgaggacgcaaccggccccgtgcggaagagaatgtattctagccccgcccagaccgtccggtgcaatttggcgacgccgtcataagtgtggtcgccggtgcattcgcaaatgacgaagagatcgagatggtcctgcaggttgccgccgacgccggggagatcgtggcgaaccttgacgccgacggatgtcagatgatcggccgggccgatgcctgattgcaacaggagcttcggcgagccgatcgcgcccgatgacaccaggacttcgcgctcggcgcggatcacttcggagcctttgtccgtcaccacttcgacgccgacggcccgcgttccctcgatcacgatcctgctcacgcgggcgccggtgcggatggtcaggttctttcggcccttgataggcgagagataggcaagagacgcggacgagcggcggcggttgcgctgcgtcagctggtagaagccgatacccgcctgctgcttgccgttgaagtcgtgattgtagggaatgccgagctcctggccggcgcggatataggcgtcgcagatcggtagcgcggagacgggcatcgagacgccgagcggcccgccataggcgtggtagtcgtcggcgaagcgctggttgtcctcggcacgcttgaaatagggcaggatcgagcggtagtcccagccctcgcagccatcctcgctggcccagagatcatagtccgctgcattgccccttgtgtagagctgggcattgatggacgagccgccgccgatcacctttgcctgcgtgtagcgcagcacgcggcctttcatgtgcttctgcggaacggtttcccatccccagctcgccacgcccttggtcatcttggcaaagccggccggcatgtggaacagcgggttccagtcgccgccaccggcttccagaagcagcacgctgacatccggatcttcgctcagcctgctggcaagcacgcatccggcgggacccgcacccgttatgatatagtcaaagcccattggttctatcctgtcacaagcggggaatggaaaggccgccatcggcgtcgatgacggtgccggtcgcaaaggcgaaggcgccggaggcaagggccgagcaaatccggccgatatcgtcggcctcgccccagcgcttcatcggcacgaggccgccttctatcagcgcgtcgtatttcgaggtcacgcctgccgtcatgtcggtgcggatgatccccggccggagttcgaaaacggagatgccggattccgccaggcgcagcgccagcccttgcgaaaaggcggcaaggcccgccttgctgatgcaatagtcgaggcgctccggagagctcgcctcggccgataccgaggtgatgttgatgatcgaacgcgggtgcggcttgtcgccggaaacaagcatcgccttcaccaccgcctgggtgaagaacaccgtgccgcgcaggttcgtggccatgatcgcgtcgaaattgtcgggtgtcagtccaaggaaatcgcccctgaccacggcagccatgccggcattgttgaccaggcaatcgatgcggccgaaggcctgcaggatcgcgtgaaccgtttcctcgtgcttttcgaccgcggagatatccgcctgcaggtagatcgcatcgccgccgtgctgcttcaactgcgcgacggtctcgtccgcagtctccacggcgccgacgcctgttatcacgacattgaagcctgatttggccagcgcgccggcgatgcccagcccgatgccgcgacggccgccggtgaccacggcgacgggcttgtccgaatgcgtcgtcatgctctcaaatcctttgatgcgatgtgatcggcaacgcgcaatgcctggctcgccaccgtcagggccggattgacggccgccgaggtcggcaggaagctcgcatcgaccacgaagaggttctggtgatcgaaggcgcggcagtagatgtcgagcggagccgacgccgggtcgcggccaatcctgatggtcccgcactggtgcgacggcgtgcgcttgtcgaacggccggctgagcaccagcggaaagccgatcgacttcaggatttgtttgagcttggagacgagcgagagatgggcatcccaattggtgcgatgccatttcaagacgatgcggccgccatccaccatgacccggctttccggattgggaacgtcttcgctcatggcgtagaaatcgatcgcatggccggtgatccgattgagcagccattccgggacattgggtagcgagcccttcaataccttgccggagatgcggccgagcagctggacattgccgagcggcggcccgccattgccgtcggaaaggtagaaatcgttgaatgcgaatgtcttctggtagatcgaggtgtttcgatatcgcggcgagacgccgatcacggccgaggagttgtggttcatgaagttgcgcccgacctggcccgacgaattggcaagcccctcgggaaaccggtcacttgccgagcgcagcaacagcaccgctgactggacggcgccggcgctcaggatcacgagctttggatgcagcgtgcgggtttcgcccgcttggaggtaggtgacgccggagatgcaaccgtccgcatccgcttccagcttgatgacggtagagcctgtctgaaggcggacattgtcgtgttgcagggcctgcgaaagtgccgccgtttccgcatccatcttgccgtcgtcggaattcggatgcgcgtcccagggggttgcgccttcgccagccatttgtcgatgtcgacacccaaggggagcgagaagggatgcagccccttcgccttcagccgtgccctgacgtcggcgatggcgggttcctcgcgcacaggcgggtagtcgtaaggtgtcgagtgagacggctccgtcggatcgtccccgagcgcgccgcgcacgcggtacagcttttcggcacggccataccacggttccaactcctcataggggaacggccatgcgggcgacacgccttcgcggtgatggatttcctcgaagtcctcgcggcggtagcgtgagaggacggcgccgaagaacttcgaattgccgccgacattgtagtagttgccgggattgaagccggtgccgtctgcctcgtaccaggtctccttggggcggaaatggccgcgctggaagatcgcccgctggtcgcggttgacggggtggtcggcgatccgttcgccggcttcgagaataaggatctcggcgccggtggcggccagcccggcagcgacggtcgcgccaccgatgcccgagccgatgatgacgatatcaggtgttctgttcatattgctgtcccgccgtcggatcacgcgatccgcgcctggctctgcgggtcgaagaagaccaccttgtcgaggttgaatgccagtctggcgttctggccgggctgaatgcgggcgtcggcgcgcaggcgggcgaccacctccttgccgccgagtttcgtcaccgcgaaggtatcggacccggccggctcaacgacgtcgatcaggcaatcgccctcggcaagcatccgcgcgttgcggtccgccccgtcaggatcggtcagcgcttccggccggatgccgaagacgatctgccgaccggcatgcgcctgcagcgcgtcgcggcccggcgcgatcggcaagcggatcggctcgccgctggggcgggcgagcgacacggagaggcccgttgcgccctgttcgatggtgccggacaagaggttcatggccggagagcccatgaagtcggcgacgaacatgttggcggggttgttgtagatctcggccggcgtgccgaactgctgcacctcgccgtccttcatcacggcgatcttggtcgccagcgtcatcgcctcgatctggtcgtgcgtgacatagacaatcgtcttgccggtcgcctggtgcaggcgcttgatctcgatgcgcatgtcgacgcgcagcttggcgtcgagatttgagagcggctcgtcgaacaggaagagcttgggatcgcgcaccagcgcgcggcccatggcgacacgctgtcgctggccgccggaaagctggctcggcttgcggtccagcagatggccgatctgcagcaccttggcgaccttgtcgatcgcggccttgcgctcgtcggccggtacgccgcgcatctccatgccgaaggagatgtttcctgcaaccgtcatgttggggtagagcgcgtagctctggaacaccatggcgatatcgcgcttcgatggatggagatctgagatgctgcggccatcgacgctgatgtcgccctcggtgatggcttccagcccggcgatggtgttgagcagcgtggacttgccgcagccggacgggccgaccagcaccaggaagccgcccttttccagctcaagatcgatgcccttgaggatttccagtgcgccgaagcgctttctgaggcctgagatttcgagaaaagccatgggattatcctttgaccgcgcccgccatcagaccgcgaacgaaatagcggccggcgaggatgtaaacgagaagcgtgggcatggcggcgatcatcgcggcggccatgttgacattgtattcgaccacaccggtcgaggtgttgacgacgttgttcagcgccaccgtcatcggcatggactcgccggttcccgcataggcggatgcgaacaggaagtcgttccagatgttggtgaactggtagatgacggtcacgacgatgatcggcagcgaattcggcagcatgatgcggcggaagatctggaagaagctcgcgccatccacctgtgccgcgcgcaccagttccgtcggaaacgcctcgtagtagttgcggaagaacagcgtggtgaagccgagaccgtagacgacgtggacgatgacgaggttgaccgtcggattgccgaagccgagcgacatgccgatctcgttggtgagcgtgttgccgaaccggccgagactgccgagaatggtcgccatcggcagcagcacagactggaacggaatgaagcaggcaaagagcatcagcccgaacacaagcgtatggccggggaagcgccacttggtgagcacgtagccgttcagcgccccgaggatggtcgagatcgccacggcggggaccaccatcttgatcgagttccagaagtagcccttgatgccggcgcaggtgaggccgacacaggcttcgccccacgccttgaaccaggcgtcgaacgacggcgactgcggcaaagcgagcatgtttccgccctggatctcgtccatcgtcttgaacgaggtgaccagcatgacgaagagtggcatcaaatagatgatcgcgaagatcgccagtatgccgtagatgaagatgcggttgaacatccgcatgcgtgccatgctggaagcatccgatgtgaccgtgctcatcgcgatttctcccgcagttccgaatagagatagggaatgatgatcgcggagatggtcatcagcatgatcacggcgctggccgagccgacagccatctcgttgcgcttgaatgtgtattcgtacatgaagttggacggcagccaggccgagccgccggggccgcccgaggtcagcgcgaccacaaggtcgtaggacttgatcgccatgtgcgcgagcacgatgaaggcggagaggaacacgggcctcagaagcgggatgatgatgcggcgatagagctgcaccgtcgaggcgccgtcgatctgcgccgccttcatgatctcgctgtcgatgccgcgcagccccgccaggaacatggccatgacaaaaccagacgcctgccagacgccggcgatgaccacggtgtagatgacgaagtccttgttcttgatccagtcgaagtgaaagctcgtccagccgaaattatgcagcgtctgttccagcccgaggcccggatcgaggaaccatttccaggcgacgccggtcacgatgaaggacagcgccatcggatagaggaagatcggccgcaggatgccctcgccgcggatcttctggtcgagcaggatggcgagcaacagcccgagccccaggcagatcgcgatatagagaaagccgaagatccccatgttggtgatcgacgtgtaccaggacgacggcggatcgctctcgaaggtccagcgccagagccgttgataggcgcgaggcccggtcagcgcgtaggacggaaaggtcttggaattggtgaaggacagatagaccgtccagaggatgaagccgtagacgaagaccagcgtgatggcgaagctcggcgcaagcacgattttcggcagcgcgtcctgtagccagccgcgcatggaaaacgtcgttccgcgccgcgccgcgacttctggtttggtggtagcgatagtgctcataacattcatccccctcccaagggtgacgttggcagtcgacatcttccccgccgtgaacggcggggaagaccatgttcggagccgattacttggcgtcgtcgatcgccttcacgagttcctcgacggcctggtcggaggtcttgatctggccgtgaacgaacttcgagacgacgtccttgtaggcgttggcgacggccggaggcgcgccatagccctgtgccagcgagccgaacagcgtgccgccttcgttggctgccttcaggtcggcgatgcccttcttgccgcaggcgtcgaagtcggtgtccggcacgtccgtacgggcgggaaccgaacccttgacgacgttgaacgccgactggaagctcttcgacagcgtggccgtcgcaagtgccacctgggcagccttgcgatcatcgggcacgttgaacatgccgaacatgtcggagttatagatcacgctgccgtcggtgccggggaagcggtagcaaaggaagtcggtgtcgggcttcttcttggcggcgacgaattcgcccttggcccagtcacccatcacctgcaccagcgcatcacccttgatgaccatggcggtcgcaaggttccagtcacggccggagaagttcggatcgacatacttgatcagcgtggcaaggttgtcgaaggacttcttcatcgtgtcggacttcagcgactccccgtcgagttcgttgaaggccttcttgtagaactcaggcccgccggtcgacagcacgacgctgtcgaacatggtggcttcctgccagttctgaccgccgagcgcgagcggtgtaacgcctgcagccttcgccttgtcgagcagggcaatcaggtcctcgaaggtcttcggctgcgtgccgccgatcttgtccatcacggctttgttgatccacagccagttgacggagtgaacgttcacgggagccgcgacccacttgccgtcatagacggagaacttctgcagcgcttccgggaccgacttgtcccagccttccttcttcgcggtttcggtgagatcgcccatcacaccggcttgcgcatagtcgagaacggtgtagccgagcatctgcgaagccgtcggatatgtcccggccgccaccatcgccttcagcgcggtcatcgctgcgtcgccgccaccaccggcgacgggcacgtctttccacgcgtagccttccttcgccaggtcgcccttcagcacgttgagcgcggcggcttcgccacccgacgtccaccaatgcagcatctgcacttccttgacatcggcagcgcgcgccaaaccgcccacagcaccaaccgccaatgcgaccaaggcggtcgccgttagaaatctgcgcatttgaaaacctcccgttttcaagttcgcgaaacgagacccattctcgttccgtatcccccgccctcctcgagcgtggtttctgcagaccggctccccgccggtcctcagcttttgggcatccaccagttggtgcggctgccgatatgcatgttgagcgtcttcgtctcggtgtaatcctccaccgcatggcgaccgagttcgcgtccgaggccggactgcttgtatcccccgaacggcaactccgatgcgccgtccatgaatgtgttcatccagacggttcccgcgcgtactctacgcccgatcgtcaggcatgtatcgaaatccttgctccagacgccggccgagaggccgtaatcgatggagttggcgatctcgatcgcttcctcagtggtgtcgaaggtgaggacggaaagaacgggtccgaacacctcctcgcgcgcgaccgtcatccctggcgtcacctgggagagaatggtcggcgccatgaactgacccataccaagatccagcgcaccaccgccatgggcgacttcggcgccggcgctctttgccgccgcgacgtagccggcgatcttgtcgaagtgctgcggcgtgatgatcgcgccgacctgtgtcgtcgggtcgaggggatcgccgaccttcacatgcttggcgagcgccgccacgcgcgccacgacatcgctggcgatggacttgtgcaggatcagccgcgagccggcattgcagcactcgccggcattgaaataggcgccgaacacggccgcgtcgatgaaggcgtcgaggtccgcatccgggaagacgatctgcgggttcttgccgccgagctccagcgagaccttcttcagtgtctgcgccgcattggtcatcgtcagcttaccaacgccggtcgagccggtgaacgaaaccatgtcgacgtcgggatgcgacgtcatgatcgcgccgacctcggcgcccgtgccggtcacgatattgacgacgccatcgggaacaccggcttcctgcaggatttcaccgagcacgatcgtcgagccagatgtcagctccgatggcttgaccacgcaggtgcagcccgcggccagcgcgaagggcagcttctggccgacgatcaggaacgggaagttccacggcgtgatgatcgagacgacaccgatcgcctcgcgcaacacgacacccagtgtgccgtcgccgagcgtgttgtagctttcgccatgcagatcgcgggcaagggccgcggcatagcgccagatatcgaccgatcccgcgatctcgcccttgacctgagagatcggcttgccggcctcgatcgcatcgagataggcgagttcatcggccctggcggcaatgaggtcggcggccttgaggaggatggcggagcgctcggatgccgtcatgcgcggccacggcccggtgtcgaacgccctgcgggccgcggcaatcgcgcgctcggcgtccgctttgcttccggcctgaaagcggctgacgacgacgccatggctcggagcgatacgctcgatcggagcggcattgccggtgatccatttgccgtcgatcagcatcttgaagtcgcggatcgcctgattggcgagcgccttcggggtgaccagaaccgtcattaccattctcccttgaactgtgccgggcgtttctcgctgaacgcggtaacgccttccttgaggtcgccggtcttggcgaccaggatcgagccgagcgcttccaccgccgtgccgttgtcctcgccattggccgacgcgatcatcagcttggtgatctcgagtgccgccggtccacgcgtcgcgacgcggctggcatagtctcgtgccgcatcgacagctgtgccggtggcgacgaccatatcgaccatgccgaactggcgggcttcctcggcggtgaagatttcgccgcccagcgccatgcggcggacgatctgcgcaccgaaccgcttgacgagacgctgcgtgcccgaccagccggggatcattccgagtcccgtttccggaaggccgatcttgatctgctcttcggcgatcctgatatcggcaaggccggcaagctccagcccaccgccgagcgcatggccgttcagcgccgcgatcaggggaacgcgaagcgtggcgagccgctcgaaaacgcgatggccgtagcgcacccaggcgtgcccgaactcctgcggcgccatatgcccccaggccttgatgtctccgcccgccgaaaaggccttgccgtcaccggtgaggatggcgacgtgcacatccggattggcttccactgcgtcggcggcttccgacagagccttcagcatatcgaggtcgagcgcattcagcttctcgggccgcgatacggtcatgatggcaagtgagccgtcgatatcgacgcgcacggttccgctagtcatggaaggtgccctccagaacgcgggcgcttttcaccggcagcgacaatccgatcggcccttcggcaaacagcctggcgtccatcaccttgagatccttggcgacgagcaatgggaattccgactgatccagaatatgtgcctgtaggtcgatcccgggcgcgatttcggtcagcacgatcccgtcggcggtgagtttcatcacgcaacgctcggtcacgtaggtgatgtcctgcccctgttcgatcgcccggcggccggagaaggtcacgtgttcgacctcgttgaccagcttcttcagcttgccttccttctcgatgacaagcttgccatcggcgatgccgagcttggcgccggcattgaacatgccggagaagacaatcttgcgggcgcgtgcggtgatatcgacgaagccgccggctccagccgtcacatgcgggcggaaggagagcttggagacgttgaccgagccatcccggccgatctccaggaaggacaggagcgatgcatcgaagccgccaccctggaaataggtgaactggtagggcgatggcatgtaggcatcggcgttcgaggcgcaaccgaaggcgaagtcgagcagcggcacgccaccgaccgcgccttgctcgatcacccaggtgacggccccgtgctgaccctcttccatcaggatccgtggcacattcgccgagatgccaaagccgagattgacgcagctgttggcctgaagctcctgcgcgacgcgacgcgcgatcaccttctggatgttgaattcgggcacgcggaacgtatccagcgggcggaagatctcgcccgaaatcgctgggtcgtagagcgtctgcgtcgtctgcttctgttcgggatcgacgatgacgtagtccactagcatccccggcacgcgcacatcgtgcggtttcagcgagccctgcttggtgatgcgcttgacctgcgcgatgacgatgccgccgttgttgcgcgccgcgagcgcctggtcgagcccgcccagataggctccctcgtgctcgtaggtcaggttgccgtgctcgtcggcggtcgtcgccctgatgatcgtgacatcgggcgtgatcgccgggaaatagagccagtcgtcgccctcgaaggagacacgcttgaccacgggcgtctcttcagcggcggcgttcatggcgcagccctgacgcttcgggtccacgaaggtatccatccccactttcgtaagcacgccgggccgcttggcggcagcctcgcggtgcatgtcgaagatcacgccggaggggatgttgtaggccgggatctcgttgcctgatatcatctgccagatcagcggcggctcggcggtcgacgggccggaagggtaggagccgccgatgatccgcttcaggaggcccttgcgcgcgatgtggtcgatgcccttgatcccgctcatgtcgccggcggcgatcggatgcagggtggtgagatcgcgcggatggcctgttgcctcgaagcgctcaccgatcgctttcagcatcagatctgggcagccgaggccgctggacgaggagaccgaaacgacagcgccatcggggatcaggtcagcggcttgcgatggggtgatgtgcttgttcatctctctcagagtcctgtcttgaccggcaccgcggcgcccgtgcgcgcggcttgcgcaaccgcgagacctgtcgccagcgaccagatgccatccttggccgttgccgatggcttgccattaccggcgacggcggcgtgaaaggcggtaagcgcggtctcgtagagattgccgccgccaaccggcagcgactgctcgccttcggcggtccgcaaggtcacggtgccgtcaggccgctgggtcatgacgttgcggccgatcagcgagccctcggtgccatgcacctcgaaaccggtctcggcgtatttcgtggtgaagccgtcgtggaactgcgcgatgatatcgtcgtcgaagcgcatgacgcccatgacggcgtcctcgaggccttccttgcccatgccgccggcctgcgagaaggcgatgacctcgaccgggttacgtccgagcacgtagcgtagcgtgtccgtgtcatgcacggtgatgtcgagaatgacaccaccgccggcctgcggcttgtccagccgccagccctgcaggtgcggcggcaggtagacggcatgaaacacgcgcgccgagagcggttttccgatcttgcctgccgcgatcgcatcacgcatcgcagtgtgcgtcgaggcattgcgcaggtggtggttggtggcgagaacgacgcccgcctcatcggcgaccttcgccatcgcgtgggcatcctcgagagacagagccagcggcttctcgcagaggatgtgcttgccggcgcgtgccgcggcgatcgcctgggcgcagtgcaactcgttggtggtcgagatatagacggcatcgatctgcggatcggagacaagagcgtcgagatcggagacatgcttgcctatgttattctcggcggcataggagcgggcccgctccaggctggtgctcatgacggagacgacgtcgccgccagtggcgcgaactgctccgatcacccattcgcgcgcgatcgtgctcgcgccgatgagaccccaacgaaccgtcatgccattttcctcccaggcttgttcatcgctgcgccgcagctttcgcgcacgatcaggcgcacggaactgacaacggattcggcctccggctttccggcgtttatctgcttcagcagcatctgcgcggcgcgctgaccgatcccctgcggatcgaccgatatggtggtcagtgccggcaccgtggttttcgcctcgatcacatcgtcgaagccgacgacggcgaagtccttgccgggctcgatgcggcgtgccctcagcccgtcgcaaacaccgaaggcaacagcgtcgttgaagcagacggccgccgtcggcggctctggcatagccatggcgcgggcaagcgcatcgacgccgccggcgcgcgacggcgcggacgagacgaccaactcctccttgaagccggtgccggttttcgacatggcgtcgcggtaaccgctcaggcgctcgtcgaagacggcggtgtcggggaagccgcccacgaaggcgatacggctgtggcccagtgccgccagatgttcgactgcggcaaaggtgcctgcatgattgtcggagaccagcgacgagaccttggcgccgggtatgttgcgaacgacgagcacgacaggaatgccggcaaccaccagcggcttcaggtcggtcgcttcggtgccgcgcgccggtgagatgatcaggccggagacgccgtgttcgcgcatcgacgctatgacttcgcgctggcgatcgatgctctcgctggtgttggaaaggaattgcacaaagccggccgactgcaccaccgtatcgacgcccacggcgagttcggcgaagaagctgttcgtcagatcgttgacgacgataccgatgatcttcgatcgcgcattcgcctggcgcaggttcgccgcgccgcgattatacacgtagcccaattcccgcatcacggcgttgaccttcgtacgggtgctttcattcaccaggggcgaggcctgcagcaccagcgacaccgtcgacttggaaacgccggcagccttggcgatgtcgatgacggtgacccgtcccttgcccatgaaagtcctcccttggcctgtgccaattttcactgttaataattggaacgttccaactttgtcaagcggagttggttggtggagaacgatgtccatggacgagtttgccgaaagtattggttgcgatgcaaaataatatcgaaaaacaatggatatcatcgttcgcgcatcggcaagagcgagatgttgcgggcggctttcatggccaaaaacatgcttgcaatttggaacgatccaaattattgcattggcctcgtcttgaggaggaccccatgagcttgactttgaatctgcctgaagccgacggcgccgtgagtgaataccgcatggtcggaaccccgatcgagcgcccgtccaaaccaccggtattcaatcggattgcctatgcggcggcccacgtcgtctccgatccgcgccgggatctggatccctggggcaagcctgcgatcgattgggatacgacgattgccttcaggcgccatctctggagcctgggcttcaagatcgccgaagccatggacacctcgcagcgcgggatggggctcgattgggtgggcgcgcaggaacttattcgccgttcgctggaagaggcgcgccatgttgaaggtgccgatctcgcctgcggcgccggcacggaccatctcacggctgccgatgcacgctcgctggatgatgtcatcaaggcctatgagacgcagatcgaattcgtggaaaagcatggtggccgcgccatcatgatggcgagccgcgcgcttgcccgcgtcgctaaatcgcctgacgattacatcaaggtctatagccgcattctctcgcaggccaaggacaaggttgtgctgcactggctgggcgacatgttcgatcccaaccttgccggttactggggaagcgccgagttcgagccggcgctggaatgcgcattggcgatcatcaaggagaaccgggagaaggtcgaggggatcaagatctcattgctcgacaacgccaaggaagtgcaacttcgcaatcggcttcccgagggcgtcatgtgcttcaccggtgacgatttcaactacgcggaattgatcgagggcgatggcaagcgctacagccacgcgcttctcggcattttcgacgccgtggcgccgtccgcctcgaaggcgctcgcgtcgctggctgcgggagacaccacgacgttccgatccgtcatcgagccgacggtgccgctgtcgcgcaagatcttcgaggcgccgacgcagtattacaaggcgggcgtggtcttcctggcctggctgaacggtcaccagagccatttcagcctgcccgccggcatgcagtcggcgcgcggaatcaatcactacgcggatatcttccgccttgccgacaaggcaaacgtgctcgaccggccggagctggcaaccgagcgcatgaagaacttcgtcggtgtcttcggcgtgcggtaagccaggcggctggttcgacaatatccgctaccaaccaataaaaggaccggcgtggggtgacgccggtccttccgaacgctaggccgcagcgaagggaacggccacgaaggtcttgttgccgcctcgctgcacgaggagcagtacggacttcttttcggtctttgctgcatccgccacagcgttcttagcttcactcgcgtcacgaacggtcttgtcgttgaccgacaggatgacgtcacctgtctgcaggccggccttttcggcgggtttgtccggcgcgacattggcgacaacggcgccttccaccttctgcgacaggccaagccgcgcgcgaatgtcgggggtgaggtcggccagggctacgccgatcctgggtccgctctgcgcctgcttttcgctgccgctggcgctagcgagctgctgtccgtcatcgcctccgccgatcgcgaccttcaactcgacgctcttgccgtcgcgccacacggtgagggtctgcttgtcgccgggcgacaggtcggccacgaggcgcgagagatccttcggcgatgcgacgctatcgcttccgacattggtgaccacgtcgccagccttgaggccggccttggccgcgggagagccttcggtgacatcggccacgagtgcgccttgcggtttcgcaaggccaatcgcgtcggcgacatcctggttaacgccctgaatctggacgccgagatagccgtgctcgatggagccgttcttctgcagcttggcgacgatcgtcctggcttgatcggaggggatcgcgaagccgacgccaacgctgccgccgttcggcgagtagatggcggtgttgatgccgacgacacgaccgtcgcgatcgacaagcgggccgcccgaattgccgtggttgatcggcgcgtcgatctggatgaaatcgtcgtaggggccgctgttcagatccctgccgcgggccgagacgatgcccgccgtcacggtcgtgccgatgccgaacgggttgccgatcgcaagaatctggtcgccgagcttgagcttgccggaatcgccccaggcgatcgtcggcagcggcttgttggcctctatcttcaccacggccagatcggccttggcgtcggcgccgatcagcttgccgggcagttcagtgccgtcgtcgagcgtgaccttgatgttggtggcgttcgcgatgacgtggttgttggtgacgatatagccatccgggctgacgatgaagcctgagccgagggcctgcgcgcgttcgccggatcgcggtgcctgacgcggggcagggatgccttgctgttcgaagaactgcttgaattgctcctgcatctcggaattgtcggtgccactgtccgcgtcggccgccttcgtcgtcgtgacgatggtcacgaccgccggcttgtcggcgtcgacgatatcggcgaacgaaccgctgccgttaggggaggtggcgaccgccgccggcgacgcagcggccgacgacgtttcgaaggcatagggaagcgaagcggcgccaactatgatggccgcgccgagcagggctgctgaccggcggcgattgaggatattcgacatgatgtccgtcctgtgatgtgttgctcgatcgcgtgatggcttaaccagaagcaaacgcgtgaaatacatatcttccggacgagatgtattttcaaattaaatataaattaggaaatggttacgtttaattcatttattacaacaatttaatggtcgtaataaagtataactggcggcgattgcgcgcgactgcttcggcatcaaacgtgccgcgccgcgctgtattcgattggctttcaggggaggtttctgccgcgaccggcaagcttgtcctgaggatgaagcatggccgatcgcggaagagccttgggaggcattgcgtggtccgccgcagggctgggacgcggggcttcactagcccggtggcacgggcgcgtcgatacacactaaagtgacccccgcgttggattttgttatgaacgaaagtcgcagcggtcattttgcgcgccagcctcagctctgttatggctgtcggggcagaaaacgaaaccgaagcgaaagcactcgcacaatgttcctgagcgaccgtcaaaccgaaatcgtcgacatggccaagtcgaaaggccggattttcgtcgaggatctcgccgcgcacttctccgtgacgccgcagaccatccgcaaggacctcaacgacatctgcgatgcccagatactgacccgcgtgcatggcggcgcggtgttcccgagcgggacggagaacgtcaaatacgaggcgcggcgccagatcgcgtcgagcgagaagcaggccatcggcgtggccgccgcaagtctcatccccaacaatgcatcgctgttcatcaacatcggcacgacgaccgaggcggtcggcgaagctcttatcaatcatcatgagctgatggtgatcaccaacaacatcaacgtcgccaaccggctgaggctgctgccggctatcgaggtggtgattgccgggggcgtcgtgcgcagcgccgatggcggcatcgtcggtgaggcggccgtcgacttcatccgacagttcaaggtcgactacgccgtgatcggagcctccgcgatcgacgaggatggcgcgcttctcgactatgatttccgtgaagtgaaggtggcgcaggcgatcatcgccaatgcgcgccatgtcatcctggtggccgactccaccaagttcgagcgcaccgcgccggtcagaattgcccagctttcccaggttcacaccttcatcaccgatcactgcccggttccatcagtgcggcaattctgtcttgaaaacgacgtgcggctggtcgaaacgcaaagacagtcgcagaccgaactggcgtgagacgtttttccgttattcccttcaaggatgatcgttgcccatgagcctagagaccgtccgcgcatttttcagcgcatccgctcccgatatcgagatcatcgaaaccgagctgagttcagcgaccgttgctgaggcggctgaagcgcatggggtcgatccggcgcaaatcgccaagacgatctgcctgcggctcggcgacgaaccgatcctcgtggtcgcgggcggtatggcgcggctcgacaatcgcaagttcaaggatacgtttggcaccaaggcgcggctgctgaatgccgaggaggtcgttgaggcgaccagccatccggtcggcggcgtctgcccgttcgggcttccatcgccgctgcgcatctattgcgatgtgtccttgaagcagttcgacgaggtcgttcccgcggctggatcgacgaattcggccgtgaggatcgcgacggatcgcttggcggaattgacccaggccacctggatcgacgtctgccagtaggtcgatgcacgaacaattgaacgagattgaacgcaaggcttaaaacacagagaaagaaacctatataagggatcgtcactcaactcttgccatttaggagattccaggatgcctcgtgccgtttcacgttttgccaaggtcgcggcgattgccgccctgacaggcgttaccgtatttgcttccatcggggatgcggatgcgcggcgggcaggtagctccggtttcggcagccgcggcacacgcacgtttcaagcgccgccggtcaccagcacggcgccgtctcccgccgcgcccatgcagcgttccatgacccaacgccctgaaaccaacgcccccgccgcgacgcaggcggccggcgggtttcagcgtggcggtctcttcggcggcttcggccggtcgatgattggtggtctggtcgccggcggcctgctcggcatgctgctcggccaggggttcggcggcggcttcggcttcctcggcatgctcctgcaggtcgctctgatcggtggcgccatcatgctcgccgtccgtttcttcgccaaccgtcgccggcagccagcttatggggcagccggtccaggcggcgtcagcccgatggcatcgaacggcaactcgtccttccgtatcccgaccatcggctcggacgcggccggctttggcctgggcggctcgcatgccgcgccgcagcccccacgcaacaatcagccgagcgatgaaatcggtatcgagcaggacgacctcgaccggttcgagcagctcctgaccgaggttcagacggcctacggcgtcgaggattacggcacgttgcgcaaattgaccacgccggaagccatgtcctatctcgccgaggaactgggcgagaatgccacgaacggtgtccgcaaccaggtcagcgacgtcaagctcctgcagggcgatgtcgccgaagcctggcgtgaagacggttccgattacgccacgcttgcaatgcgctaccagtcgatcgatgcgctcgtcgagcgcgatggcggccgggtggtcagcggcgacgtgcgttcgcccacggagagcaccgaggtttggaccttcgtgcgcaagtccggcaccgattggaagctggcggccatccagggcacggaacagcgcgccgcctgatcgctagtagttaaaccctgcttcagccctcctgggctgtggcaggcacgacccagagcggtcgatcttcgcgccgcggcgcggaaattgttggagcggcctcctcttcggtcaggaggccgtcttcgttttcgctgacatcgacttcgtaagcatagtcgtaaagcatctcgcaggcgcgctcgctggccttgatcttggcttcggtttcgctgatcgccgaggcgatggccttgacccgggcgcgcagcatggagccgagaatatcggtcgaaggtcgtttttccagccgttccaggtgatgctcgatacgcgcggcatggcgctccagttcgcgcttggagaagcgtgccttacgcatgtcttcggacagatcatcccgcattctcgcaagcgggtcgaagctgccgggttcacgctcatccagcgtcagctcgttgacgagtttctcgatcacgatcagcgcctgcagatcgacgggatcggcgagttcgacatcataaccggtatcgtcgaataccttgcggcgaactgggtccagcagcagctcataggccttctgcacccgcccgaacgcgttcggatcaccaccggaatccggatgcgtcgtcttcgcgcgcctgcggtaggccgatttgatctggtcgtcgctcgcgtccctgcggacaccgagaatctcgtatggattggtcactgtccctccgctgctgccggacatcgtcatgacacccgtgaagggcattcgtctatcaatgtcgttcttctaccatcactggggcggagtttggacaaaagaatgcataagtttgcgtgaatgcccggattggctgaaggcatccaccgcctatccacagcttgatgacgcgcgtctgattgccacgtctttttcacgcggaaatcaatccgataggaaaatcggatgtcgcatgaatgcttaatcgatataattgcgacacttgcgttgacgctgccagtcaaatcgagttctatccgccaccttcttgtgccagccattctggcggggagcttcggaggagggtttcgtgcgtattatcaaatcgatagcggatctgagggcttgtctcgaggttcatcggcgtgacggcaagaagatcggtttggtgccgacaatgggctttctgcatgtcggtcatatggaacttgtctcgcgtgccaaggcgcgaaacgacgtcacggtggtctcgatcttcgtcaatccgctgcagttcggcgcaaacgaggatcttgcgcgttatccgcgcgatcttgagcgggatgcggcgctgctggagaatgccggcgtcgattttcttttcgcgcccgaggtgacggacatgtatccacgcccgatgctgaccgttgtcgacgtgcccgacatcggccggcagctggagggcgaggtgcgcccggggcattttgccggggtcgccacagtcgtcaccaaacttttcaacatcgtccagccacatgcggcctatttcggcgagaaggactaccagcaggtggtgctgatcaagcggatggtcgaggatctcgcgcaaccggtcgacgtgatcgcggtgccgacggtgcgcgaggccgatggcctggcttgctcctcccgaaatgtctatctgagcgagaaggagcgtgcggcggcggtcatcgtaccgcgaacgctcgacgaggctgcgcggctttacgccgagggttgcgatgatcccgcgcaattggaagcggcattggcgcttttcgtggcatccgaaccgctcgccaccgccgaggttgtcgccgtcaggcatccggagacgctcgaaccgctcacgtcgctgcaatccgggcctgcgctcgtggcgcttttcgtgcgcatcggcaacacgcgcctgctcgataaccgcgtcatcggcctgagcccgactgcacggtcgagggccaggtgatgagtgcgcagggcaagcaaaagcggctgaccacggcctcgatccggtcgatgaagggcgacggtcgtatcgtctgtctcaccgcctacacgacgccgatcgcgcgcttgctcgacccgcattgcgatctgcttctggtcggcgattccctcggcatggtgctttacggcatggaaacgacggtcggcgtcacgctcgacatgatgatcgcccatggccgcgcggtcatgcgcggaacgtcgcacgcctgcgtcatcgtcgacctgccattcggcagctatcaggaatccaaggagcaggcctaccgcaacgccgtccgcatcctgcaggaaacgggatgcgacggcgtcaagctagagggtggtgaggagatggccgaaaccatcgccttcctgacatctcgcggcgtgcccgtctttgcccatgtcgggctgatgccgcaactggtcaacacggccggcggcttccgctcactggggcattccgagcaggaggcggcgaagatccgtcgcgatgctgcggcggttgccgatgtcggcgccttcgccgtcgttatcgagggaacggtcgagccgctggcgcgcgagatcaccgcctcgctggcgatccccaccgtcggcattggcgcctcggccgcctgtgacggccaggtgctggtttcggacgacatgctgggcctgttcagcgatttcaagccgcgtttcgtcaagcgcttcgccgacttgagccctctcgtgtcacaagccgtagaggcctacgctgaagacgtgcgcgccggtcgctttccgggtgccgaacacaccttccagccgcgcaagtaaacgccagcgtcattgatacgtaagcgcgatgtttgatcacgcgcctttcgtggaaattgcatctttttggaagtacgctacagtcagctggcttcacttcaaagttgcgaccggctgatatcgatggtcggcgcctcttctcgaagtggtgacggtactatgtcgatcccgacgtattcgcggcggtggaaagatttctaggagtgatttgattgctgcaacctccggccatcggccgacaggtccgcagcgccgataaggcctactcagcttgtgtcagttatggaattcgggggaactcctaaaatgcacatcaagacgttcagcctgcttctcttatgcctctcgttagcctcctgccaaaagcagggcggtgagcccgccgaaatcaccattcctgttcgcgccgaaccggtcgcccttcaggatttccgctacagcatcaagctcaccggcgcgatcgccgcgcatgtcgagtccaatctctcgttccgcgtcagcggcaaggtcaccgagtggaccgccgatgtcggtgcgcatgtgaccgccggacaggtgatcgcgcgggtcgatccgcagcaacagaaagccgatgtggaggccgcgcaggcagcgcttgtcgccgcgcaagccgacgtcgagcaggcgacctctgagttcgaacggcgcaagacgctgctcgccagcggttcgatctccaaggaatcctatgatcaggcggcaaccgcgctcgatacatcgaagggctcgctcgacaacgccaaggcgcagctcggaacggcacaggattctctcggctataccgagctgaagacggatgcggatggcatcatcactgcccgcaacgtcgaggtcgggcaagtcatgcaggcggcgcagaccgcgtttaccctggcgcaggacgggccgcgcgatgcggtgttctatatctacgagacgttgctgcaatcgaaacccgacagccccagaatcgaggtggcgctcgtcagcgatcccaatgtcacggcctttggcaaggtcagcgagatatcgccgacgatcgatacgtccaccggcactgtgcgcgtcaagatcacgctggaagagacgccgccgaggatgacgctgggtgcgccggtgaccggcttcgcgcaatcggcgccgacgaaaatgatcatcctgccttggacggcgttgtttgccatcgacggcaaccccgctgtctgggtgatcgatacgaaggatgaaaccgccagtttgaagccggtcaaggtcgcgacgtacgagaccggccgcgtgatcatatcgggcgggctcgatgtcggcgaaatagtcgtcaccgacggtggcaagatgttgcgaccgggccagaaggtgacggtcgagggagggcagagctgatgtggcggtcgtctatcccgaagcttcttgtcatccccatgatcatcgcgcttggcgcctgcagcgaagaacaggagaccgctcccccgataaggccggtcctgtcgagcgtcatcgagctcacgaatttgccgacgccaagctttgccggaacggtcgcgccgaagacggagacgccgctgggctttcgcgtcggtggcttgatggtggcgcgcgacgtgaatacgggcgatgtcgtaaccaagggcgagcttctggcgtcactggagccgacggcgctggagcttgccgtccggtcggcgcaggccgagcttgccaatgcgcaggcgcaactcgccaatgcgcgatccaccgaggaacgtgcccgcgcgacgttccagagcggaacggcgaccaaatccagtctcgagagcagcgtccaggcgacccagaccgcgcaatcggccgtggtgcaggcgcagacggcgctcgacaagtcgaacgaggatctctcgtacgcgcagcttctcgcgaccttcgacgggattgtgaccgccacgtccgtcgaggtggggcaggtggtgtcggccggcgaatccgtgctgacggtcgccatgccgggagagcgcgatgcggtcgtcgacattcccgaaggggagctgatacccgcaatgggcgacgcctattccatcctgttgcagatcaatccgtcgattacgtcgatgggtgtcgtgcgcgaggtggcgccgacggccgatgctgcgacccgtacgcgccgcgtcaagatcgcccttcaatccccgccggacgccttcaggataggcacgaccatcacggctatcaggcaggctcgcgatatcaagaagctcttcctgccggcttcggcgatcctcaatcaggatggcaagaccctggtctgggtggtggatgagaaacaggagatcgttcgatcccaggaggtgaggcttcgcgacaagacgtcggcgcatccggaggtcatctccggcctggagccggggacgcgcgtcgtcatcgccggcgtccatagcctgaaagaggggcagaagatcaaggtcgagggtggtgcgcgctcatgaacaagttcaacctctccgactgggcgctcgaacaccgctcgatgatctggtacttcatgatcgtcttcgcgctgttgggtattttctcctacatgaacctcgggcgcgaggaagatccgaacttcaccatcaagacgatgacgatttcgacccagtggcccggagcttccgccgaggagaccacgcggcaggtgaccgaacgcatcgagcgcaagctcgaggagctggattcactcgactacaccaactcgctgacgatcgcgggccagacgaccgtgttcgtctacctcaaggattccaccaaggcgcgcgatgtgccggggatctgggtcgacgttcgcaacatgatcagcgatatcgaggggcagtttccctcgggcgtgcaaccgccgacgttcaacgaccgctttggcgacgttttcggaaacatctacgccttcaccgccgatggcttcacgcagcgccagctccgcgactatgtcgagagcgtgcgtcgcagtatcctcaccgttcccaatgtcgggaaggtcgatctcgtcggagcgcaggacgaggtgatcttcctcgagttttcgacgcgccagctcgccgcgcttggcatcagtcaggccgatgtgctcaacacgttgcaatcgcagaacgcgatcacgccgtcgggcgtgctgcaggcgcagggcgagcgtgtcagccttcgtgtcagcggccagttcacctcggaagacagccttcgcagcgtcaacttgcaggtcaacaaccgcttcttccggctgagcgacatcgcgaccatcacgcgcggctacaccgatcccccgacggcgctctttcgcgtcaacggcatgcccgcgatcgcgctcgccatcggcatgaagcagggcgccaatctgctggagttcggcaaggcgctgcagaccgagctgcgcaaggtgcacgcgacgctgccgatcggcatcgagccgcatctggtcgccgaccagcccgttatcgtcaaggaggcggtgtcgggcttcacgcgggctctggcggaagcgatcgtcatcgtgcttctggtgagcttcgtcagtctcggctggcgggcggggctggtcgtcgccttcgcgatcccgctgaccttggcgatcaccttcgtcttcatggaatatgacggcatctcgctgcagcgaatctcgctcggcgcgctgatcatcgcgcttggcttgcttgtcgatgacgccatgatcgccgtggagatgatggtcgcccgacttgaagccggagacccgatcaccaaggcggcgacctacgtctactcgcatacggccttcccgatgttgacgggaaccctggtgaccgtctcgagcttcatgcccgtcggcctcaacaacagcgcggccggcgagttcaccttctcgctcttcgtggtgatcgcggtgtcgctgatcgtgtcgtggatcgtggcggtggtgttcgcgccgctgctcggggtgacgatcctgccgaagacgatgaagcgacacgaggagaagagcggttggttcgtcaacggcttcgcgcggctgctcgatctgtgcatgcggttccgctggatcaccatcgtgttcaccgtcatcgccttcgcctgcgccgtctttggaatgcgtttcgtgcaggagcagttcttcccgtcatccgaccggctggagctgatcgtcgatttcgcattgccgaacaacgcctcgatcagcgaaaccgacaagcagatggcgcagttcgagaaggagaagctgcagggcaatcccgatatcgaacgctggtccacctatgtcgggcagggcgcgcagcgcttcgttctctccttcgacgtgcagccggcgagcccgtcgttcggccaggtggtgatcatcaccaagagcctcgaggttcgcgacaagctgcgtgtggatctccaggattatctcaccaagaccttcgtcggcaccgacgcctatgtgaagctgctcgacatcggtccgcccgtcggtcgccctgtcgcctatcgcctcagcggtcctgacatcgaacaggtccgccagcgcgcgctggaactcggcgcggtcatgagccgcaatcgctcgctcggcgatgtcgtttacgactggaacgagccgcagcgcgtcgtgaaggtcgatgtgctgcaggacaaggcgcgccagctcggcgtcacgtccgaggacatcgcgtcggcgctgaacggaatcgtcggcggcgcgtcggtgacgcaggtgcgcgacgatatctacctgatcaccgttctggcacgcgcccaggcatccgagcggcggtcgatcgagacgttgcgcgacctgcagctgcgcaccagcaacggcaactccgtgcccttggcggcgatcgcgaactttcgttacgaaaccgagccgccgcggatctggcgccgcgaccgcctgccgaccgtcaccctcaaggccgccgtcatcgacagcaagcagcccgcgacggtcgtcgatcaactgaccaaggacatcgatgcctatgcagcccagctaccgccgggctttacgcttgaggtgggcggcagcgtggaacagagcgccaagagccaggcgccgatcgccgctgtggtgccgatgatgttgttcacgatggcgacgatcctgatgatccagctgcaaagcttctcacggctgtttctcgtcttcgccgtggcgcctctcgcgctgatcggcgtcgtgatcgcgcttctgtcgagcggcgcaccgatgggtttcgtggcgatcctcggcattctcgccctcatcggcattctgatccggaactcggtgatcctcgtcgtgcaggtcgaggaactccgacgagaggggcatcatccctgggatgcggtgcgagaggcgacgcaacatcgcatgcggccgatcttgctcacggcggcggcggcgagccttgcgcttattcccatctcccgcgaggtgttctgggggccgatggcctatgccatgatgggcggcatcatcgtcggtacagtgctgacgctgctcttcctgcccgcgctctatctcgcctggttccggatcaagcgaccggacggcgaacatgttccggaaaaggaagcgactggaggcgcgggctgatcaggcccgtagccagtccgtgatgccgcgcgcggcggcgcgcccggtcgcgaagcacgcggtcagcagatagccgccggtcggggcttcccaatcgatcatctcgcccgcgacgaacaggccggggtgccgcttcaacatgtaatgctcgtcgatctcgtcccaatcaatgccgcctgccgatgaaatggcctcggcgatcgggcgcggggccacgaccgggataggtagcgccttgatcagccgtgccagccgtgccgggtcgcgcaggtctgcatcgccgccgcattcgcgaacgaggttcgccttgacgccatcgaggccggcgcctttgcgcagccggctggcgaggctcgccttggcgtcctgcctcgcaagatcgtgttcgatccgctccagcgcgcgaccgggcatcagatcgacggaaagtgtggcgggctgcccggacgtcagcgcgtctcgcaatgccgcggcatgggcgtaaaccaggctgccttcgatgccgtgtcgagtgatgacgaattcgccctgcgacgatcccgccgacgaggtcgccaccacggactttatcgcggcgccggcgaagcgctcgcgaaacaccccgctccagttgacgtcgaaaccgcaattggccggttggaaatcgtgaacggcaatcgccgcatcccgcaaccagtcgatccaacgaccgtccgatccaaggcgcggccaactctggccgccaagcgccagaagggcggcatcgggccggacaacatggttgccctcaggcgtttcgaacacacacccgccgtctgaaaagccctgccagcggtgtctcgtccgtatcgtcaccccttgcgcgtccagccgcctgatccaagcgcgcaacagaggtgatgccttcatcgccacgggaaagacgcgtccggaggttccgacgaaggtctcggtatccagggtcgcggcccattgcctgatgtcatcagggcggaaagcgtcgagcgcgccgcgcaggcgaccgttcgcgctgccaaagcgtgtcgcaaagcgctgatagtcttccgaatgggtgatgttgaggcccgattttcccgcaagcagaaatttgcgcgcgaccgtcggcatggcctcgtagacggtgaccctgtgcccggctgaagacagaatctccgccgccatgagccccgccggcccgccgccgatgatggctacctctttgtccgacatatattcgcccgcaattgaactcgcgagcccgtcatgacgcttacgcccaatatacgcaaccccgccaaagcggaaccgcgtacaatcacatcagatctgggtggtgaacagatcgagcttacccgccggcgaagccgcctcagtccacgaagcgcggggtaaagcgcggctttgccgacgcttcttcctctttcatggcgtcctcgtggtaccagcagctatcgtagacacagggttccagatctttttccaggtcgaccttttgccgaagcgacgatgaagcgaaacgcttccccggaaaagcgtggatcgttgccgactcgtgatgcgcaccagtaaccatgtcatgcctccaaattgagtccgccctaaagcgttaagaaggacaatagcatggatgcacagagaatgcgctatttgattgaaaaaagtgcaacaaatgtttgaatcgtgggcaatggcgatttgagcagctttatatcagaagttggtgcaatatataaaatgtgcatttgcataataaatgttcacagtgaccgtcgtgcggaaaaaattgacgccttcgctgttcagtcttttcaggcgtggcaattgatctcgcggtgacgtaaccgcttgagtccgctggcagttccggaccgttttcggtcgttggacgctcggggtgtagccatacaatcgaggcgtttccgaccagccgtttcacccctcgtcgcgaactggcacggtacatgcatacccctttgcatccctccatgggcaaggaagcttcggctgacgcgttcctgggacctgctgacaccttagtttgagagactcgcaaatgaccaagtataagctcgagtacatctggctcgatggatacaccccggtaccgaaccttcgtggcaagacgcaggtcaaggaatttgcagaattcccgacgctcgagcagctgccgctctggggcttcgatggttcctccacgatgcaggccgaaggccgcagctccgattgcgtgctgaagcccgtcgccgtttatccggacccggctcgtaccaacggcgtgctcgtcatgtgcgaagtcatgatgcccgatggcgtcactccgcatccgtccaacagccgcgcgaccattctcgacgacgaagatgcatggttcggcttcgagcaggaatacttcttctacgaaaacggccgtccgctcggcttcccggagcagggctatccggctccgcagggtccttattattgcggcgtcggctccagcaatgtcggcccggttgcgcgcgaaatcgtcgaagagcacctcgacctgtgcctcgctgcgggcatcaaccacgaaggcatcaacgccgaagtggccaagggccagtgggaattccagattttcggcaagggctccaagaaggccgctgaccagatctggatggcacgctacctgctgcagcgcctgactgaaaagtacggcatcgacatcgagtatcactgcaagccgctcggcgacaccgactggaacggttcgggcatgcactgcaacttctcgaccaagttcatgcgcgaagttggcggcaaggcctacttcgaagctctgatggcccagttcgaaaagaacctcgatgctcacattgccgtttacggcccggacaacgacaagcgtctgaccggcaagcacgaaactgctccgtggaacaaattctcctacggcgttgccgaccgtggcgcttcgatccgcgttccgcactccttcgtcaagaacgactacaagggttacctggaagatcgccgcccgaactcgcagggttgcccttaccagatcgcctcccaggttctgaagacgatctcggaagttccgacggctggtttcgcttcggctgccgcctaagcgctatgcttgattgaatgtgatggcgctggtcgaaaggccggcgccatttcttttagatcgcggctgatgtgcctcgcattggcacggcgatcgacggtcgcagcggttccttcccgccgatcccgatttttctaaaccgtgtttgagatcgctatcgtctaacggttgaaaaactcaaccgagtggccgcattccttttgcgttatagtcgcttttcactatacttgtcttggatcatccaaacgcgagttacccttggtgtcagtggctaagcacagcctcctgcttcgcttgctcggaaagccagcgcttttcgccaatgacggcgaaatcgtgcttccggaaaaggcctatccgctcctggctttcgtggctgcgtcgtcgcagttttcgatggagcgcgagacgttgcggggtatgctatggcagtccgacgtgtcgaaacagcgcgccggcagccttcgacagctgcttgcgcggatcgatcgcagcgtgccggaagggctgccgcgcctgatcaccgccaccaacacgtatatcacgctcaatgccgagaactgggccacggatgtcctgctcttgcgggacgcgacgcatccgttggcgcggagcgattggggtctgctcgaaggcgagctgcttgagggcttccgcgcgccgacgatggaagccgatgagtgggtcacgatcgagcgtcgccggatcgccgaatgccgcgatgcgcatctgatgacgctgcttgattcgcccgaaaaactgacgcttgccgatatcgtgttgctggcggggctgcttgtggccaccgatccggcgaacgaggcggcatgccgcgcgctgatgaaggcgcatgcgacggcgggcgatctcgcttcggcgcggcaagcctatttccgctgccgcaacgaattgaaggccgagtatggcgccgagccggatgcaacgacgcaggcgctcgcgctggaactcggcatcatcgcgccggccgcgcccgttgtagcggaaacagcatccgtccggcctgcggccgccgatccgctcggccagccgcgcgtgctcatccttccgccggagacaatgctgtcggagccgctgctgcagcgtgtcggccgggcgctcctagaagacgtcacgatcggcctcagccagcagcgcggcttcaaggtgatcgcggcgcataccagcgtcgagatcctgaaccgcagcctcgccagtggcgaactgcagcccatgccgccggaattgcgcttcgattacaccgtctacgtgaccattcacggccgcgaggatgagatttacgcaacctgccgcctgacgaagacctcgaccgccgaggttctgtgggcgatcgatctgccgcttgccatgcagaaggtcaaccagtccttcggccaattggcgcggcgcatcgtcatgacgctcgccgatacgatcgagcggcgcgaactgacggatatgatgcacgatgtctcgccctccgcctatcggctttatctcgagggcaagcggcttgtatcgaaaaccgatctgcagcacctgcggcaggcgcgaaagtggttcaaatccgcgctgacgagacatgaccggttctcctccgcccatgccggcatggcccgggtgctgggcatggagtggctcgttcgcggcatgaaggacaccgcactcctggaagaggcggatcgctcggcgtggcaggcgcgcgacagcgatccgaacagcggaagagccatgcgcgagcttggcttcgtcgcgctctatcgccgacgctttgccgatagcctcgatttcttcgccgaagcgcagatgctcaatccgaatgatgcggatattctggccgatcacgccgatgcgctcttgcatgacggacaaagtgatcgcgcgctggagctcagccacgccgcgctgaagctcaatccgttgccgccggattactactactggaacctgggcggcattcactttgtccaggagaattacgccaaggcgatcgaggtgctcgaccgtgtcaaggaccggccggcgacctcccgtctgctcgccgcggcgcacgccaagaatggcgacaaggccaccgcagcgcactacgcctcggttgtcctcgagaattttcctgattttcgcaccgaagatgtctggcgtttcgtgccggatcgcaaccctgacgatactcgtcagttgatagacggactcaggatggccggtctgtcctgaagtgcgacacatcgcgattttggccgttaattagcgaaatttccagtcacaccggaataacgccggccgttcacagtctctcctgttcgcagcaaatgctgccaccaaaaggagaaaacaatgaccaacgcaatcaagtccaccgttcgcctctccgctgctgctcaggctgttctgaagcagaatgccgttcaactcgacaccaacgcgaccgcgaacatcgttcacgctctgaagttccgttgaggttattgcggatgtctgttcaggcagcactcacggatctggctggggatctaagtctctccgcggcgggcgtcagcgcctaccacgaccgctccctgacgcctggacagacattcgcggcgatcaagccgcacttcgccgagcttggaataacgcgcgtcggcttgttgacggcgctcgatcttctggaaattccagttgccttcgcgacccgcccgaacagctacacgctgtccgtcttccagggcaagggcatcgacgaggaagccgcgatgacctcggccgccatggaggcggtcgaaacccgcgttgccgagatgcagccggatgatctgatcatcgccacgctcgccggcatgaaggccgagcgtgcaccgctcatcgatctcgattccgttgcccgttgcgtgccgtcggacatcgatgccggcccgctcgcctggagcgaaggcctcgatatcatgaatgacaagccggttttcgtgccgtggtcactggtcgggctcgatcaccgcggcacgcgtccttccggcttcgagcagtccagtgacggcctggcatcgggcaaccggcccgccgaagccgtgctgcacggcctttgcgaactggtcgagcgcgacgcatgggcactgacgcagctgcgccccttcgatgaactgcgcggcgcttgcatcgacccggctgggttcggcgatcccgtcatcgacattatcaccgaccgcatcgcccgcgccggcatgcggctcctgctgcttgatatgacaactgatatcggcgtgccgagctttctcgctgtcatcgttcccggcgacctcggcgatcgcgtcgatgcgcgctggacgaatgtctgcggcggctgcggctgccatcctgatcctgtccgcgcggcactgcgcgccatcacagaggcagcgcagagccggctgacggcgattgccggcagccgcgacgacttttcgccgcgcgtttaccagcgcctcgatggcgacgggccgatgcagcagctgatcgaactctgcgacgagacgccggtcgcgccgcgctttgccgagcctgccaagcgcagcatccagcagaccatccgtcatatcctggatcggctgcgggcacggggtatcgagcaggtcgtggccgtgccgatcccgcatccgcgccttccggtctccgtcgtccgcgtcatcgtgcccggccttgaggtcgatgtcagcggtgaattcattcaacttggcttgcgcgccatcggcgccatgcagggagcccaggcatgagagtaattttcgcaggaccgagcttcggccgagatctcgacaggcttcaggccgagcatccgtcgatcgagtttcgcggaccagccgctcgcggcgatatcctgcaggcggtgcgcgacggcgcgcgtgccatcggcatcgtcgatggctatttcggcgagatgccgtccgtctggcacaaggaaatcctcttcgcgctcgagcagaacgtcgtcgttgccggcggcgccagcatgggggctctgcgggcagccgaatgctcggcgttcggcatggtcggcatcggctcgatctatgacgattacgccgatggccgtcttgtcgacgacgaggcggtggcgctggttcacgcgccggccgagcttggctggctgccgctttcggttccgtgggtcgattatcagccgaccatcgacgcgctgaacaggcagggcctgctcctgtcgggcgaatacaagaagcttcttttggcgggccgcgcgctgcatttctccgagcggacatatccgaaggccgtcgagcgttgcgccttcgacaatgccgctcgcgccaaggagatcgtgagattgattcgcgcgaacaagatcgagcggaagcgcgccgatgccgatatggtgctcgcttacctcggcagcgtgaaatttaccgccggaaagcgcaactggggctttgccgcaacgtcgcattgggagatgctgcacgcggaaatcagcaccccggtaacgcctgtaacgctctaataacgccacgcctgaatgatgacagcactggagccccggaagtggtgtttggggcatctcagagaggcggacgatatgaacattcagacggtggacgagggcagcggcagcgaatatgcgaggatattccgcttgctgtccgcagcaaaagatgaagcgcagaagctcaagctgaacaatctgacgcatcttacgaacatggctctgctgcaggtcgtcatcgattgggatggaatcgacccggagcgcgagctggatgtgaacctggagaagctgatcggcacaaagacgaagctggcgatgaaagacgcgcgagaaaacctcgtcgtcctggagcgccactgaccgtcgattggatccgcgaaagccgctttactcggcggcttcgctttcgatctgctccatgccggcaattgcctgcaccagcttgacgatcttcttgcggacctgttcgttcttgatcgacaggaaagcagcgttgagcagcacgccatcgcgcgagacgacgaattcgtcgctcggcgtcggattgtcgttggcattggccgaaatatcttcgaagaaggagcgaacatcgacatcgagcgcgccggcgatttcgaccagcatgcttgccgaaacgcggttcgagcctttttcatacttctgaatctgctggaacgtgacgccgacgcggtcgccgagttcggtctgcgaaaccttgcgcatcaagcgcttgatgcggatcgtcttgccgacgtgtacgtcaacggtatgcggagcttctttcatggccttatccttctaacgccagttgcggcgtgcttattattccctgcggcaaccttaccaagatatttgaacggatcaattgtgccgttcatttttattcccgccaactcatctgcctgaatagcctgactttcaactgaaaaagcctgtagatcagcaaatttgcgtgacgtcgaatgcaatcataagtaagcatttcggttcatttcggtcaagcgaggctcatatacatcttccggtagataaatcgccggattttgagatttgcatcgaaggccgtgatatccacctggagccgcttttcgattggctgtccaggcgataacaaagcggtgtacgctgcggatcaaagattggattagtgccatccgaacttattgttgtggcctggatttgttcgcgcgtacctgcggcagcccctgctggtcaacgattttgacgtaaagtgccaacagaatgtcgtgaagccggctatcttttttcgcaaacttagcgcgcgagccgcgatgttccgatgcatgcgcggccaaggggacattcgtcgaaaatttcggacgcgatcaacgatcaattcttcattagcgcactaccgagagtggattatttgtgtatcggatcgatccaccggacgtgttccggcttttcaaccggttcgatatcgagattgacgacgacagggtcctgcccggagcgaacgaggacgcattccagcgtctcgttttggctcgcattgatctcctgatgcggcacgtaaggcggcacgaaaatgaagtcgcctggcccagcctcggcggtaaattcgagattgtcgccccagcgcatgcgcgccttacccttcacgacatagatgatgctctcgagatctccgtgatggtgcgcgccggtcttcgcgttggcgtgaatggtcaccgtgccggcccagatcttctcagcgccggcgcgggcgtggttgatcgcggtcgcgcggttcattcccggtgtctgagcggtgtttgggtcgagcgcatcgccggggatgactttgacgccgttctcgcgccagtcgatgtgggaatgatcagcgtcatgacggccgtcatcgttgctcaagtcgggtctccttgccttgtccgatcgcgggctccgcccgcagatgcctaaccgacgtgcgccgacgaaagcgtgtcgagcttgcggcgcagccggcggcgaacgtcgtcgtcttgctgctccatggcgccgagcatgtcgcgcagtgtgccgcgcagaccgtgtatctgatcgacgagatccatgatgagatcgacaccggcgtcgttgacgcccatatcccgggtgaggtcgaggatcagccgcgcccgcgcgacatcgtcgtcgcgaaattcacgatcgccgtcgtgagcttcggggatcaaccagccctgcgcgacccacacgtccaccacggtgacgtcgatcttcagggttcggcggaattcaagatcattcatggctactcctccatgccctttctcggattctgcggattggccggcacccacgtgctcatgaattcggcaagcttcggctccggtccatccggcaagacgactttcagtgacacatagatatcgccggcgccgccgccgcgcttcggcgcgcccttgcccttcaggcgcaatatcttcccggtgctggaattggcgggcagcgtgagattgaccgcgccggatggcgtcggcacgcgcaccttgccgccgagcaccgcctcgggcagcgatatcggcagatcgaggcggatatcgtcgccatcgcgcacatagaacttatgcgggcgaacgcggatttcgaccagcgcgtcacccggcggaccgccgccgatcccgggctcgcccttgcccttcaggcgcagcgtctggccgtcgcgggttcctgccgggatctgcaaatcgagcgcggggccgtccggcaggcgtatctgcgtcttggtgccattgatggcgtcgagaaagtcgacctccatggaatattgccggttctgcccctgcgagcggaattgcccgccgccgcgtccgcgtccggagaagaagctcgaaaatatgtcgtcgctgtcgccgaagtcggcgaacccggcattgttctggtagcggccgccggcgccggcctgcgaggcgtagtcgcgataatagttgcgctgcgcctgttccgcgcccgtcatgtcgatctcgcctctgtcgaagcgcttgcgcttgtcctcgtcgccgacgatctcataagccgccgagatctccttgaaccggtcttcggccttcttgtcgccggggttcaggtcggggtgcagcttcttggcgagcttgcggaacgcgctctggatctctttttgcgtagcgtccttcttgacgcccagaagctcgtacggatctcggctcatacatgtctccgttcagccggtactgatcaccgacatctccgcatgtatataggttgcaaagccgcgcgggacgagaggcgcgatgtcgcgccttgaacttcagccgaccgagggaggggcgtgttacacgcctgctatcctgcgaagatcgtcaatggcgccgggccccgcggcaagcaccttcgcgcccttggtcagcccctcgccgttggtcgggaaggggtggaaccagccgcctgcttccttgaccaggcagtatcctgccaggcaatcccacgcgtgcatatagggttcgtaatatccgacgagacggccggccgcgacataggcgagcatgagcgcgccggacccgttgcggatgaaattaccgcccgctcccagcagttcctcgaccatcctggcgaccgtggcgggcgagacgtggctgttcgcgccgatgccggtcacggcgttgcggatgttgcgcttggggctgagctcgagccgcttgccgttcagggtggctcccatgccgagcgcggcggcgtagagctcgtcgtggcagggcgaggcgatgacgccgacaacaggcacgtcgtcgtgcagcagggcgatggatacgcaccagttcggcatgccgttgacgaaagggcttgttccgtcgatcgggtcgatgacccatgtgaagcccgaggtgcccggggtcaggccatattcctcgccgagaacgccatcgccgggatagacttccgcgaaccgcgcgcggatcaggttttcaacctccctgtcggcaatcgacacgacgtcctgcggatcgcgcttcgtttcgacaatgagcgtttcccggcgcttgaaatagtcgagcgccacggcgcccgcctcgcgggcaacggcttcggcaagggcgagacgtgcttcgagccctggaataacgcgcaatgtcatcgcaacatgtcctttgttggaaacgatggctggaaacagccgctgaaactcgcggtcgcaaggtgctgcagccgggaaggccgccgcaggcatacttgcaagcgcgtgcaaaacgaacacttcgccaagccggatgtcaataatcgtcatgaaaacttcatattggccgaggtcattgcggattgcacgcaagtgcaagtcgatgcaaaagtgcgtgcaacaaagggatcgtcatgccgtctaaattattcgtgagcgcacaggaagttgccgagagggcaggggtatcgcgttcggcggtatcgcgaaccttcacgccgggcgccagcgtttcggccgacacccgcaggcgagtgctggaagcggccgaagcgctcggctatcacgtcaatcatctggcccgcggtctgatgcgcaacgagagcggcatcgtctgcctgatcgtctccgacgttgcgacgccgtatcgctcggcgcttttgcgggaactgaccatccaactgcagaatgccggcaaggtcgcgatgttcgtcaacaccgaccgctcggatggcagtgtcgatcgcgcgttgcagcaggccattcgctaccgggcggacgcctcgatcattctctccggcctgccggataagtccatcacccagctttgccttcgcagcggccagcgtctggtgctgatcaatcgcgatgacgatcagccgggcacgttgaagatcaatctcgacgactacgagtccggcggtcggatcgccaccgcattcgtccgcaccgggtgccggacgctcgcattcgccaattccgaagcgaggacgccgagcctgatgggtcgcgagcgcggcttcatcgccgccgcggaaaagctcggtctcgaggtcgtcgtcgaacgctacggatcgacggggtacgaggcgggaagggtgcttgcacaacgcatgctgacgcgcgccgaacggcccgatggcgtgttctgcgccaccgatctgctcgcctgcggtttcatggatgcggcacgccatcagttcgggctgtccatcccggaccagctctgcgtcgcgggcttcgatgacatcgaacaggcgtcgtggtcatccttcgacctcacgacattcgcgcagccggtcatggcgattgcctcacaggccgtgaaatggcttgccggcggccatgaggacgaaccggaagaggcccactcgatcacgttgaaggccgaactgatctggcgtggttccatccgcaaggggtgagcctacccgcacggcccttgaaaccacaactgtccttgaaacatggcgtgcttttttaacgcaggattgccttatcgtagcgcttgccttaaacatgactttcttaagaaggtatagtgcgcatcctatccatgacatttcagcctcgcatgcagaacaagatcgaaggtttctccgttgtcggcggccttcacaggcgatcatggaacggcatcgtcgcggacgtctgggatgtcgaatgcgcgccctatgccggtggttactatgtctcgaatgacccccggcttttcgttctgctcgatatgaacggagccggccgttcgacgatgaagctgacctcgaagggcgccgacgccgcggaggatggcgaaaaccagccgatctcctatgtgccggcgggcatggagctctgggccgatctgaagaatgtccagtttcttcgtcatctggatctgcatttcgacgccgagatcgtggcgcgccggttgatggaggagcttgatcgggaccggttgacgagcgcacggttgctgttttccgatgatcgcgtgctgacgctgtcgcgcatgatcgccgccgaatgcatgaacccggcgccgttgcacgatctctatggcgatggtctcgcgctggcgctgatcatcgatgtcatgaagcttgggaaggccgagccccgcaagcgcagcaagcttgccgcctggcaactacgcaaggcaacggagttcatcagcgaaaactgcatgcgcaatatccggcttgaagagcttgcgacactggcggggctctcgcaatcccacttcagccatgccttcaaggcttccacaggcctggcgccgcaccaatggcagatgaacgcccggctggaacgcgcaaagcagcttctgcttcatggcgaccagtcgctgatggtcatcgcggcggaaaccggcttctccgatcaggcgcatttcacacgcgtgttccgaaagaatgtcggaacgacacctgccacgtggaagaaagcccgcgttgcctgaacgacacaccatttgagcgtttggccgcgccgcgaaaaattgcccaaaaacattcaattcgtccgcgatcgggacaagctgaaccgttaaaactgagttaatcactcagcttattctttgagttggccggtcgttgggatggcggtggcgtgagtagggtgacagtaaacatgggtgtgagagcagaccgcgtgatcttcagggcaaggcttttggcgggcgtcgccatctttggtgcgagcgccacgttcgctatcgcgcaggacgcgaccgagctgaaaccggtcgtcattcagggctccggcaattcggccgatggctccagcgaagcaaccggcacgggccccgtcaagggctatgtcgccaagaagacgacggctggttcgaagaccgatacgccgctgaaggaaattccgcaggctgtctccgttatcggccgccaggagctcgacgatcgtggcgttgtcaacaaggtcgacgaggctctgcgttatacggcaggcgtcgccacgcagaccttcggcaccgatccggataccgattggttctacgtccgtggcttcgatgccggacagagcggcgtctatctcgataatctcaacctgttttcctacgggttcggcaatttccagatcgatcccttcatgctcgagcgtgtcgatgtcctgaaggggccggcctcggttctctacggcggcgccaatgccggtggcattatcgacatggtccgcaagcgcccgaccgacgatccgctctactataccgagatcggcatcaactcgaacggcaacgccttcacgggtttcgacttctccgacaaggtcggatcgagcgacaccatgacctatcggctgaccggcaagatcgccggaggcgatggctacaccgattacactcgtgatctgcgcggcttcgtcatgccgcagctcaccatttcgccggatgacaccacgagcctgaccgtttgggcctatgccggtggtctggatcagacccatacgggcaacggcttcctgccttatgagggtacggtcgtcgaccggccgggtatcggcaagatctcgcgccgcttcttccctggtgaaccggatctggacaccggccgttacgatcagcagatgattggctatgagttcgagcgcgagttcgaaggcggctggaaatactcgtcgaatgcccgctacggtcgtctcgacaaatacgagttccttgtctatccctcgctctatgccagccagaccgagctccagcgcctgaacttcgagggcgacacctcggttggcacattggcctgggacaatcgcatcgaaaacacgttcgaccttggcgccaccgagcacaaggtgatgtttggtgtcgattaccgtctgtacagcatcgacaacgtgcagaactccgtcttcggcgccggcgatccggcccagccctacaacggcaatcttgacgtgctgaacccgatttatggccagacacagccgacacccggagcgctttacagcgaagacgtcagaatgaatcagctgggcgtctatgctcaggatcaggtccgtttcggcaacggatggctggcaacgctcaacggccgctacgattacgtcaacaccgacttcaaggatcggctggattcgtccaacagcttcgacgaatccgacggcgcctggagcggccgcgccggcctcgcctacgagttcgacaacgggctgacgccttatgccagcgcatcgaccttcttcaacccgatggtcggccgtggtggacatggtccgctcaagccggaagagggcgaacagtatgaagccggcatcaagtacgagcccaccttcatggatgcgtccttcaccgcctccgtcttccgcatcaacaagcgcaacaactcggtttcgatcccggtcgctccgtggacggaccagcttggcgaagtggaatcgaagggcttcgaactggaggccaaggtcaatatcgacgataactggaagctgctcggcgccttcgccgcgaccgatgtcaccgttgtccagaatgacccgaaccccggcctgatcggcaagacgccttatgtcgttcccgattacacggcgtccatgtgggtcgattacacggtgacgaacggcgcgcttgaagggctcagcctcggagccggccttcgccacaagggccgttcctgggcggacgaagccaacacgcttcgcgttcctgaatcgaccgtgttcgacgcggccatccgctacgaaaaggaaaactggatggcatcgctcaacgtcaccaacctgttcgacaagcagtatgtcgaggcttgccgtacggccggcgcttgcggctacggcgatgcccgcaccttcaccttcaagcttgccaagaagtggtaagtctactctgatcgtgaaaacggccggagaacgggttgtcccgttctccggccgttatcgcttccatgcggccgcttcacgcatgcgacgcgcgcaatggccagatcagccggcgaccgtgaagtagatccaggccgcgacaaaggccgcgatcaccgcgacgatcgagatcagtttgcgcagccatgggcgtggcggcttcggggtcttttgcggcgcgggcttgcggaactggatgacgttatcgctcatctcgcctgtttcctcgttctaacggacgacatcatgctcccatagcagcgtcaacttaaatgaaaaagcgggtgatcgcgtcgcgtttcttttttctgcgcgcgacaaccgaattgcaacgccggcggccgttgtctcgccttcttcgtatcgatgcctgtccggccacttgttctggccgctcgccatggacaggaccaatcctgtcgcctatgaaacaggagaatttctggttcacttggtggctttatgacatatcagttcacgtccggccattggcccatcggcggcggcgaaaccggagaacttgttcgcggtttcgattgggcggcaacctcgcttggcccgatcagcgagtggccgcagaacctgagaatcaaggtcaattcgatcgtcaattcgcccatcccgcaggtgctgatgtggggcgacgatcatgtgatgatctataatgacggctacgtggagattgccggcagctaccatccacgcgcgctcggcgcgactgtccccggcatctggccggagatctgggactggaacagcaagattctcgaggccggctttcgcggcgaggtccagtcctaccgagaccagacgatggtgctgcatcgccacggggtgccggaagaagtcgtcttcgacctgttctacacgccgatctatgacgacgacggcaaggtgaacggtgtcctctgcacggtgcttgaaaacaccgacaaggtgaaggcggtggccgagctcgcggacagccgcgaggagctgaagcggctgacggatgcgcttcccatcctcgtcggcttcattgatcgcggccatgtctaccgtttcgccaaccagggctacatggaatggttcggcctcgacgcagccgacgtcgtcggcaagcacgtatccgaggtgatcggtcagacgagctaccaggcacgtctttccctggtcgagcaggcgatggcgggcgaccgtatcattaccgacacgtccattgtccggccggatggggcgcatcgcaatgtcgagatacgctacgtgccccggcgcacatcgaccggcgagatcgacggcatctacgtcgtgatgatcgatatcgaggatcgcaagcgatccgaagtcgccttgcagcggagcaatggccgcttccgcgcggcggtgaacgccgtccacggcgtgatctggacgaacgccgccgacggacgcatgctgggtgagcagccggcatggtccgcactgaccgggcagcccttcgagagctatcaggattatggctgggcggaggccgttcatccggacgacaaggacggctcggtcgagagctggaaggccgcggtcgccgcgaaggcgacctatgtccacgaacacagggttcggcgcgccgacggcgtctatcgaaccttcgccattcgcggcgtgccgatcttcgacgcttccggtgagatcgaggaatgggtcggcgttcacacagacatcaccgagcagcgcgaggccgaggccagccttcaggaccacgccaccagccttgagcggcaggttcgccaccgcgtgcgggcggaagagcagttgcgacagctgaacgaaagcctcgaggcgagggtcgaggccgagatcgccgagcgccaccagaccgagcgcgccctgcagcaggcgcagaagatggaagcaatcggccagctgacgggcggcgtggcgcatgatttcaacaatctgctgcaggtcgtctccggcaacctgcaactcctgtcgaaggatctgatgggcaacgagcgggcggagcggcgtctggccaatgcgctggccggcgtcaatcgcggcgcgaagcttgccagccagctgctcgccttcggccgccgccaggcgctggagcctcgggttatcaatatcgcgcgcttcatcggcggaatggacgacctgctgcggcgttcgcttggagaagcggtcgaaatcgaggtgatcaccagcggcgggctatggaacacctatgccgaccccacgcaggtggaaaacgcgctgctcaaccttgccatcaacgcgcgcgacgcgatgaacggttccggtaagctgacgatcgagatgggcaacgcggcgctagaccaggaatatgcgcgcacccatcaggaggtcatgcctggccagtatgtcatgctcgcggtcaccgataccggaacgggcatgtcgccggacatattgaacaaggtgttcgagccgttcttctcgactaagcccgaaggcaaggggaccgggctcgggctttccatggtctacggcttcgtcaagcaatcgggcggacatgtgaagatctacagcgaaatcgatcagggaacgacggtgcgcatctacctgccgcgttctgtcgctgacgaggaccgcgaggtaaccgtgcacggcgggccggtggttggcggtacggaaacggtgctggtggtcgaggatgacgaggaagtgcgttcgatcgtcgtcgagacactgtccgatctcggctacagcgttctgaccgccaaggatgcgcaggccggattgaacgtcatcgaaagcggcatgcagatcgacgtgatcttcaccgacgtcgtcatgcccggaccgctgaaaagcagcgagatggcacggcgcgccaaggagcggctgcccggcgtggccgtgctcttcacctcgggctacacagagaactcgatcgttcatgggggaaggctggaccccggcgtcgagttgctatcgaagccctatacgagggaggcgctggcgcgccggcttcgtcacgtcatcgcgaaccagaagcagatcagccaggtgtcctcgccgcgaagcgcggcgccgatcgaccagcccgtggcggcagtcggcgtgcgtattctgctcgtcgaggacgacttcctgatccgctcgaacacggccgaaatgctgctcgacatggcgcatcaggtgacggaagcggcggatggagcggaggcactcgagtttctgcgggccaacgagatcgacgtgctgatggcggatatcgggttgcccgatgtcaacggcgtcgatcttgccgcggccgtgctccgcgagcatcctgacatcgccgtcgtgttcgcgacaggggagcacagtctgccggccggcgcgccgcccaaggcggttctgttgcggaaaccctattccgaaatggatttgaagtcggccgtcgagcgcgccgtggccacgaggcgctaggcgcgaccggccagcattgtcgttatcatcgccttttcgccgaagcgtgaatgccggaactgaccgaagatcaggatttgagtgaagggactgaattgaatgtcgattgcgactgaaatcttgccggtgaccgaggaaacgcgcacccagcgactgaaggccgcaacacacgcagcgcatgagcgtctggacaagcgtatcatgcaggtcaatcccttcgccgacaggcagagctacgctcgcctcctgcacatgcaatacctgtttcaccgggatctcgatgccttgttcttcaacgagcaactcgatgccctgcttccggatctggccggccgccggagactggcgctcatcgagcaggactttgccgatctcggcctagacacgccgcaaactgagagtgttccgacattcgccagcggagacaaggtcgcgattgcggaggctttgggatggctctacgtgatcgaaggctccaatctcggcgcggcctttcttctgaaatacgcggccaagctcggtctcgacgagaatatgggagcgcgccatctcgccggagcgcccgaagggcgtggcctgcattggcgtatattcaccgcggcgctcgatggagtcgatctgagcgctgaagaggaacgggcgctcatcgccggggcggatgccgcattcgcgcgcgtctacgatttcgcggagcttgccttctccaggcaataagatcgtcgggcttcactggtcctgccggcgtggcaacgtagaccgatcaggtcactatcaggaaattggcgcaactcgcatcgacgcttccgatgcggattcggtgttcggtcgcggcggcaagcggtcggaaagtaacgcgcttggcggccttcgcccgccgcagcaattcttcgccggcaaacaagagaccgtctttctcggtcatttcgtaggcaacatggccgttatgcccgtcgtcgacgatcgtgatcgtccccaagcctgaacgcattatgtgagtctccctcgcattgtgcatatcgtgcattagggagataaaaagttcaatgcgctgaacgggttgtccacctcttggcgagcgaacggcggacaaagaaaaagccccgcggagtgcgaggctgaagtttcggtcgcatcggggaaagcgaatacgaccaaggcgctcatagcctattgcccgcgtcgttaacaggccagaatctgtcggtctggtacgcatcgcgagaatatctcggctgtcaccgcgcttgaccgcgctgagatgtatagacaaaattccgcatgagaactgggttgccatcggaccgatgccccgattcaggaacatggggtatcggcatgcgaaatcgattgaaccacgacgcaatggctgccgtggggttcatcgaaccctggagcgtgaaggccggttccgccacgggcgcctttctttcctgcaccgatccgaatgcgagcgtcagggtcgtcacgcttgatcgcgacgaagcgctcgaggtcgattgggagattgagaggcattcgaacgcgttctccatccgcgaatatgatctcggctcctgggccgagattccggctgtatctcgtcggtctgaggtctacgagctgtccctggaaattctcttcaccaggaacgagagcacgaagccggtcgtcgcgatcggtccgctgctcctgaatctggtgcccgatggtggtctggttgccgttgttgacggtgaaagccatcccgtcgccgatgtccgtaacgagcggtggtatcagctcgacatctctttttcgctgagcgcgatgggtttcaaggtcaggcgtgccgaccagccggtcgtagcggaacgcacgatcccgcttggcctggcggatatctccggaccgatttgcatcggcggcgtctcggatcgttcgcgccggaccttgaatgccagactcggccgcatccggctaaccagcgccgaccagacgacggaatggcgctttcccaggcgtggcccggtaggcagcatttcacccgtgcagcaaggcggcccggcgatcatcgttcacaatgcgccgacatttgcggtcgcctcgccgcgctttaccggcgaggtccacgatccccgtctgtgctcggatcaattcgatgccattcatctgcacgacgatgatttcggcggcttcgactgggcggcggatctgaccgtgaatatccccgaggatgcacggtccggcgtctatgcgctcgagatcgggacggatcgcggagtggagaggctgccattcttcgtgcgcccacgcgagccgcgatcgaacgtggcggtgctgctgccgaccgccacctatctcgcctacgccgacgaacaactaccgccgcatcgctacccctggcatggcagcgaccgcgcccacctgttcgcgatcgacaacaatttcctcagtctctacgacacgcacagcgatctcagcggcgtcagcctgacctcgagccggcgtccgcgcgcgacgctgagggatgactatcattacccgctgtcgaactcgccgcatctgctcccggtcgatctgcagctgctgagattctacgcgcggcgtggcatcgcggtcgacgtattgaccgatcgggatcttcacgatgaaggcttggcgagcctgtcgccctatagcctggtgttgacgggcagtcatccggaatactggtcgtcggcgatgatgaatggcctggatcgctatctcggttctggcggcagtctcggctatctcggcggcaacggcttttactgggtggtcgctttcgacggcgacaagatggaactgcggcgcggcaagaacgatatctggagcgggcggccgggagagatgcatctctcgatgacgggcgagccgggcggaaactgggaagatcgcggcaaccgccatccccaggcgctggttggtgttacttatgtgatcatgagcttcggcgcatcgaggccctatcgccgcttgaaggggagctacgccgccgaatatgcgtggctgttcgagggtgtcggtgagaccttcggcgatagcggcaccgtgcttggcggagcggcggggtatgaggtggatgcggtactgcgctcggaagagacgcctgccaatctggtccggctggcggtcgccgatggcttcgacgacagctttcaggtccgcccggacctttggcttgccgatgacgaggcggagcggacggcgatgcggcgatcggatatgacgatctaccggcacgaggctggcggattggtgttttccgccagttccgttgcctggatcggtgctctaccggcacccggagaagacaatgatgttggacgcatcatgctcaatctcgtcggccggtttatgggttaaagcgcatcgtcctgctgcgatcccgctcggatcgccgcgagcacttccttctggatggagatgaagtccgaggtcgagatcatgtcctgatgtctcggtcgcgccaggccgacatggaaggtggcgttgatccggccgggattgatgctcatcgaaatgatgcggtcggacaagtagaccgcctcctcgacgtcatgggtgacgaacagcactgtcagacgatgctcttcccagatttgcgtcagcagctcctgcatctgatggcgcgtcagcgcatccagcgcgccgaagggctcgtccatcagcaacatctttggccgataggacagcgcgcgcgcgatggcgacgcgctgcttcatgccgcctgaaagctgcgaggggaaggcatcggcgaaacggtcgagcttcaccagattgatatggtgtcgcgcgacttccctgcgctcggcagccgacaagcccgccgcctgaagggcgaactcgacgttctgctgcgcggtcagccaagggagcagcgtgtaggactgaaagacgacgccacggtcgagaccggggccgacgatcggcgcgccatcggtcaagagcactccgtcattgaacttctgcaggccggcgacgatcgaaagcagcgtgctcttgccgcagccggaagcgccgaccagtgacacgaactcgttgtccgccagttccagatcgatatcgctgagggcgtgaacgcttcgcttgcccgatccgtaccacttgttgagcgattggatcttcagtttcggttcattcatatcaatgtctcgacgtataacggaagaaaacacgctcgagagccttcatgctctgatcggtgatcagaccaagtatgccaagaagcaggatgtagccgatgatcgtctgcgtctggaaatagcgttgggacaccacgatgcggtaaccaagccccgaggtggccgcgacaagctcggccagaacaagccaagtccaggcccagcccatgctgatcctcagcgtgtcccagataccgggcagcgacgacggcagaacgatgcgccagaggatcttcggttccgacaggccgagcgttcgcccaagcccgacgaagtcaggcggcacgcgcttgacgctgtccatcaccatcagcacctgctggaaaaacgtgccgatccagatgatgacgaatttctggatgtcgctcgttccggcccacaggatcgtcagcggcacgaaggcgacgacaggcatgtagcgcacgaagtcgatgaacggttcgatcgccgcttcccaggtgcggtagcaaccgatcatgatgccgatcgggatcgccatcaaggacgccagcgcgaagccgacgagcattctgtagatactgatgccggcatcgttcagcaacgtcccatcgagcgtcagttccaccatcttggtccagacagcccccgggctcggaagaaagatgggcttgacccagccggtcgcggtcgccgcccaccaaaaggcaaatagcagcgcgaagacgcacaccgcgatcaggaggaacgtttttgcgccgagcggatcaccgatgcggaatgcgctgggcggtcgcccgacacccgcgcgcgaggacgcgcgggtgtcggtgctggcagacgaggattgtgatgccgacatggatgatccgtcttgagaagcgcgttacttgttggccgcgtcgacgaaggacgaatcgatcatctgttcggcggtcacgtcctgggtcaggatcttggcaagcttggctgccttgagcacatcgacgaaggtcttggtcttgaattcgccggcgaaggccttggatgcctcggcggtcgtgtaatattgcacgccgtcgaatgcggttgcgagatcctcaggcgatgcgcccacggccttggcgatgatcgcgcggtcttcggcggtgttggccttgtagtcggcgagcgccgcgtcccaggccttcagcatggccagaacctgacccggcttggacttcagaacgtcttcgcgaacaaccagcacgtcggatacgaggcccggatccttgccggcttcgaagagaagcttgatggccttgtcctgcgcacgtgcggtggagatgtacggctcgtaggtcacggccacgggaacccggccggcgatcagagcggagccagcatcggcggccggcatcggaacacgggtgatgtcgtcgatggtcatgccgttggcggcgagcgcgtaattgagcaggatgtcgctcgtcgtgccttcttcataggcgacgctcttgcccttcaggtcggcgacgctgttgatgtcgctgcccgcgaggatggcgtcggccgtcaggctgaaatcgagaagcgagacgatcttcaccggcaggccggccgcgaccatgcccatcgcggtgtgggtcgcgatgttggctgcgtccagctggccactggcaagcgctgcgttcagatccttgtcttcggtgaagttgacgagttcaacctcttcgaggccggccttcttgaacagacccttgctggccgcgacgtgccactggccgtaaccgagccacggctcgatgccgagcttgaaggtgccggcttccggcttggcgggaatatccgccgccgcggccgggccggcctgcaccagagcgccgataatgccggcgacaatggccaggcgcgacatgtgagacttgatcgatgcgtatgtcatggtaacccctcttttctacgatgatgtgttcgctaagctcgaagccaagacgtcattcgtgtgtttgtatgttcagcctatattttgggcagtcggctgaacggcattatgtatagtcatttgtttgcccgaacttgtaaatctgaatctgcgcggtatcgccgatcgaggcctcgaaaccccgtcggcgtctacccctctatgaatgcgcatgacgatttcggcaatcgccgatgtcgcgtcctggcgaattcgtgatgtttgaaagctctcatctcacgcatgctccggatcgatcgcgtcgaggaaccgggtcacgatatccgagccttcccttggctcgctgcccaccatcacggcggttgaaaagccgatcagcgaggaggtcggattatgcgtggccgcgccggcgcgaaggttcatgaccagcgtcgggcagaggaagagcccgagccggatcaccgttcgccaatcctgtggaagcagcgctcgactcttcagctccgtaagcaacggcttccacagcgctgtcgccttggcgtcgagaagggcctggcggaccgggcttggctgccaatcgaaatcggcatgcagcgtgccattttcacagcgcgcacgggcttcgaatctctgctcggcaagatcaggctcgtagagccagagtgggtgggcgaagatgttgtggaaggtggttttgacttcggcaagcaaagtcggaatgttctcgccggcgaaagcggggtcgaagaaggagagtgaggcgccgttttcgctcttgcggtaccagacgttcgcgttgtgggcatcgccatgggcggtgacgccgccggcatcggcaaggcgaagcggcgcgagccgcttgtgcgcatcgtcaaacagctcgccgaccgtcttttcataggcaatgccgttgatgacgaaacgcgccgccgcgaattcgttccaatcgagcgaaacgccggggaaggcgaaacgcttgccgatgtagaagctctcgtatcggccacccgggaatgtagcgccgggttcgctgacgagacgggcggaaaagagccggtgcacgggctcctccgccacctgttccggcgtcaccgggtgcaatgtctcaagatagaccttcagcaccgcctcgctgagtttgcgttcggcatccaccgcctcagcggccgcgccggcatccggctcgagatcgatggcgcgcagcacgtctgagaacctggggtcgaagcgacgtttatagacgaggatctgttcgcccggcagggtcgacatcatcacgggctgatcgacgggaaggcccgcgcgtgtcaggatatccgcgcggtaatactcgccgcccatcttctcctcgccttcctcctggtggaatttgaagaagtatttctcctcgccgctttcgaagaagccgttcagcgagttcagactgtactggtcgaaattgatcgcgaggttccgcgcatcgagctcgaacagatcgaaaagcaactcggcgagaagtgtctcggccatgccatcgcgcttcttggcgtgatcgcgaataatggcggttcggctcttggtctgggtcatgaaatgcgcttctcgaataagctgggagttgatgcgtgttgtcaggcaggcttgtgggttgggcgataccggctgccgagggagtagcggctgccgacatgggtgaaagtattgacggtcgcgaccgtggcgccagtccaggtcttgcggtgaagaacgaggcagctgtcgcgctcgggcatctgcagcagccgcgcctgctccgggcctgctggtagcgcgctgatcaggtgttcgacttcggtcagcggcgtgcagcgctgcagatattccagcgtcgcgatcgaggtgaagtcctgatcgagataatgcggaacgagcgcggggttcacataccgctcctccaactgcaccggaatgtcattttcgaaatgcacgacgagcgagtggtcgacgggcttggtccgatcgaattcgaatgcgcggacaatggcgggggcgggatgctcgacgcgctcgagcaggatgacaccggcgcggtgcttgccgccgcgatcccggatctcgttgatgatgttgctgacctcgatcagcgtcgactgcgccttgggcggcgcgacaaaggtgccgacgccctggaccctgcgaagatggccctccgcggtgagttcgcgcagcgcacggtggacggtcatacgggagacgcccagcgaatttacgaggtcgttttcggagggcagccgggcattctgcgcccacttgccgctgccgatgttcgcgagcacgaagtccttgaccttctcgtagagcggcgatgccgaatccgaaagtgcactcaatgacaaactctccagttccttctcgtaaacggctatcgcgtggcgaacctcaatccgcgatctcgacgatggtcttaagtttctggctctggcctttgagcagccgctgataggcatccggcacgtcgtcgagcgatgccagaacctcgctgaattcgatgagcgcgggcgccagctcgggcagcagggcgatcgcttccggcagctcggatgcgaaagcgtggcagccgaccagcgatatttcccgttccaccaggatgttcgggtcgagatccagcttgccatggctgatgcccacaagcgccaaggcgccgccaccggcaagcagatcgaggccggcggcaatcgcgtgaacgttgcccgtcgcatcgatggcatagcgcagccgttcgccgttcagcgcggcatcgatcgcggctttgtccagaccgaccgccgccccgccgcagatgcgcgcgaccagcgcggcgcgctcggcattggtatcggcgaacagcagcttgcctttgtgaagcttcgagagcagcagaccgctcaagccgccgatcgtgccgcaaccgatgacgagaacagcgtcaccctgtgtcgcgttgaggcgtctcacggcatgcagagcgacggcgagcggctcggccatagccgcgaccttgggtgcgagcgatggttcatgcttgaagagcagcttggccgggagttgcacatgctcggcaaaaccgccttcgcatgcttcgccgacgaagcccagcgcctcgcatatgttgctgcggcccgacatgcaggccgggcaggtgccacagtagacgcgcgagtcggccgccacgtagtcgccgacctgaagatgctcgacaccttcgccgacatcggtcacgcgaccgcagaactcgtggcctgccgtcgaggggcgtctgctgatccactggccggtgcggtaattgtgcaggtcggagccgcagatgccggcggcgcgaacctccacattgacgaagccgcggggtggggccgatggcgggtcgatcgcttcgacccgcaaatccccagcatcgtggaggcgcaccgctttcaagggctcagcctttcgtcttcaggtaggcgtcgcgcacgtcggatacggcgttggcgtgcgatgagaagccttcgtagagcgcaagcttgcgggcgtgcgcggcgaactcgggataggctggcgccgtgacgtagccgatcgagctgcgcttgacgaagtcggtcaccgaaagcgggccataggtgcgcgcccaccggctggtcggcagaacggcgttcgggcccaggcagaaattgccgatgctgacaggcgtgtgcggcccaagcaggatctcggcggcttcggtgatgtggccgagatgcgcgaaggcgtccgtggagagaatttcgaggtgttcgggcgcgtaggcgttcacgaaggcgtagctctcctcgatcgaggaggtcagcacgatcccgccgcattttcctgtgagcaccgtcttggagaagccgacgcgctgttccgtcatccggccccaatgctccggaagggcggcgatggcttcttcggcgacacgacggctgtgtgtgacgaggtaggcggacgaatccgggccgtgttccgcttcgatcaggagatcgagtgccgcaagaccgccatgcacggtgtcatcggcgaagatcatcgcttcggagggcccggcaggcaggccggtgtcgatcacgcccgagagcaggcgttttgccgccacgacccacgggctgcctggcccgacgatcttgagcgccggcttgatcgtttccgtgccgtaggcgacggccgcaacggcctgtgcgccgccaaccttgtagacggtgtcgacaccggcaagacgggccgcaaccagcgtcgcggcgtccacggttccatcgggtgtcggcggggtgacgatcgcaaggttaggcacaccggcaaccacggccggaaccgaggtcatcatcgtgaccgacgggaaggagccctttccgcgcggcacgtagagcgcgacggactggatcggcgtgacgcggtcaccggcgaatgcgcccgggcgaatttccttcagccacatcgcctcgggcttctgctcctcgtggaaggtgcggatgttggatatgccgaacttgatcgccccgatgacgtcgtcctcgacaagcttgaaggcggcgtcgaactcggcctcggtcaccttgatcgagctctcagacacatccgccttgtctagctcgcgtccgaagcgtgcgacggcccggtcgccttccgtgcgaacggcctcgaggatcgggcctaccttttcgataaagccggagatgtcggtctccgaccgacgaagcagagccgatttctcgtctgaagaaagcttcgaatattcgtaaaaggagacttcagtcattgtgcacgtaaccttgttggcgtcttgggcaaccgccggcgaaacccattgaaatgggcacggcttcgccgccgatgtccgttcgatcggctgtctactcaaaccagtggctcaggtcgaggattgatgttccgctttataattttcgtcgaatgaaacatgtatatacatgccatgtcaacgcacttcgcgacgagaattgtgcgtcgcagctgaaacgtggtcatgcgtcagatggaggcgaggaagccgccatcgacgggaaggcaatggccggtgatgtagccagccgcatcgctggcgagaaacacgacggcacccccgagatcggccgcttcgccgaagcggcgctgcggtatcctcgtcagcatgcgcgcctgccagtcctcgtcctcatagaagccgtcggtcatcgctgtcctgaaatagccgggggcgatcgcgttcacgcgaatgccggcctcggcccattcggcggcgagcgcgcgggtcatcccgagcaggccggatttggatgagccgtagggaacggcggtggggacgccgacaaaggaggtcagcgagcagagattgatgatgctgccgccggtctcctggttggacatccgcttcgccgacgactgcgaccagaaaaacgcgcccttgagattggttccgacaatgcggtcccacagcgcctcgtccacatccagcgacggtgcgacctgctcgatgccggcattgttgacgaggatgtcgatcccccccgtgagcgtgcaggcctgctccagcgcggcatcgatagaggtcaggtcgctgacatcttgtgcgacggcgacgcaccggacaccccggccttcgaccttggtcttcgtatcctgcagcgacgccagctctctcgcagtgatgcaaaggtcggcacccgcatccgccagagccagggcaatcgcctggccaaggccgcggcttgcgccggtcacgacggcgacccgccccttcagattgaatgaatgtccggacatgtgatccctccgatgtttcaccgaggaaagcatctttccgcgatcatatctatacatgtaacggtcgtggctgatggcgccgccgtcactggccctcgtcggggatgttcagcagatgtccgcaagccttgcaatgcacggcatcggcatcatggcgctgcaggccgcattgcgggcaggggaagttgaccttgtagggccgaacgaccgcctgcgcgaggcgaacgaaaagcgaaatgccgacgatcatcgtgacgatcgatgtcagctttcccatcacaccgggcaaggtgatgtcgccgaagcccgtcgtcgttaccgtcgccacggtgaaatagagggcatccacgaagccttcccagccgccctggccgtagaagaacgtcgtgtagacaaagccggtgacgatgaacaggaagaccacgaggttgacgcaggcgcgcacgacatccagcagatgcgcgcagccgagccgccgcaatccttccttcagaaacgggctgttgccgatcgcccagatccgcatggcgcgcaggaaggtgaagttgaacagcagatccggaagcagcagggtcgcaagtatgaagagatcgatccagctcatcggccgcttcacgaaagccttgacactgccggcgagaatggcctgggcgatcagttcgatcgtcacccacacggcgatcatgtaatcgatgataagataggaaggccccgttctaagataaggaccgaagagaaagaaggccaggatggcgagatcgacgaaggcaagcagaccctgcagctgaagcgaacggacatcccttccgcgttgcagccagttcagttgttttcggagtttcgtgacgatgcagccagcatcgcctgaatcggtgtgcgcgttgctcatccgccagaactatcaaccgctttcagcttttcaaccgcgaacccgccgcaggggcaaaatcccggcccgacgcggccgcttccatgggatgtctggcaaccacagcgtgtcgcttgccttgatcctgccacgctgacgacatttgcgtgttacatcggtgtagtattcccctttgcaacaaaggagtgtgccatgcaggacatgaccatgtcggaagtcttgagggatccgatgatccgccagatgctgcgggccgatcggatcagcctcggcgttttcgctgaactgctcgaaacggcggccaagaagcgcgcccatgccttttccacaaatggaacagccgcgttttgcgccggaatgcttgccgaacaggccgaaacgcagggcaaatcggcgccttgagccgctgtttgccggaggccgatcctcgggcgtcgaagattattcaacagaagaattagatataagaacccgtccccgccccgcggggacgggtttaccgatccgtaaccccacggaccacggtgtttgggaccgctgtccttttgatggcattccttcatgttgccatgcaactgaaagtacgttgcttggttagctggtaaggttaccagctaagcgatggggacaatacctgcgttgaaggcaatgctgcctgccaaagcttgcatccgccgtcccgacgtcgctggatgtaagatcggtttcgttgcgtcgcagtctagatgcgctgctgtgtggccttgtcgaagaaatgcacgttcggcgatctcaacgagagcctgacgacctggcccggcgcaaggtcggcgcgctcacgcatgacccacgtaatctccttcccctcgacctcaagcgccacatgcgtctccgaccctgtcggttccaccacgctgacggtcgccggcacgccgccgtcctgcgcgaacgccaggtcctcagggcgaatgccgacgatgacgtcgcggccatcggcgttcgcggcacctcgcgagagttcgacctgtttacccgatggcagcgttagccgcggcttgtcgccgcccgtcaacttgccttcgaggaagttcattgccggtgagcccatgaagccggcgacgaagacattctgcggtcggtcgtacagctcgagcggcgtgccgatctgctcgaccttgccgccctgcagcacgacgatcttgtcggccatggtcatggcttcgatctggtcgtgcgtgacgtagacgatcgtggtcttcaggcgctgatgcagtgccttgatttccgcgcgcatcttgacgcgcagcttggcgtcgaggttcgacagcggctcgtcgaagaggaataccttcggatcgcgcacgatggcgcggcccatggcaacgcgctggcgctggccgccggacagctgcgccggcttgcggccgagcagcggctggaggccgagaatccccgcggcctcgccgaccttcctgtcgatctccgccttcttcgcgccggccagttccagcgcgaagcccatgttctgcgccaccgtcatctgcggatagagcgcgtagttctggaacaccatcgcgatatcgcgatccttgggctgcagattgttgacgacgcgaccgccgatcgaaatctcgcccccggtgatttcctccagcccggcgatcattctgagcagggtcgactttccgcatccggacgggccaacgagaatgacgaactcgccatcggcgatgtcgacgtccacgccatgaatgatgtcgacggcgccgtaggatttcctgacgtttctaatggccaatccggacatggaattcctccctttgagacctgctcaacgcttgctgcgtacgcgaagtgccagatatggcttgcccggcagctcaacgccgaatgcggcgtccgccttgccgccgcgcacgatcgcgccgtggcgcgtcgggtgcgggatcggtgcttccaccttcttcgcgggcgtgatcgtcatgttccacgtgtcgatgatatcgacttcatagttgtcgccatccttcgggaaacccgaggaccagacgacgggctgatgctcgccgagatagatgtagcgtaggtcggtgctgccatcgcgcacgccggaaacgcgggtccatggccactcgccgacggcgcccattgggtcgaggccgtgttttacgtcctgctccaagagatcgcggaaaaagccgatgcgcttccacgcttcgccgcgcagttcgccgcccttggcccaccagatcaggtcgtcgggatgcgaataggtctcgccatgtccggcatagccgccgcgcgttacggtgatccagaaacgatgcaccagttcctgtgcggtcaggttgccccagcactgaacgatgttgccttcatattccggttcgtcgttgacgacgggcttgccgtaggcgtcgcgccaggtctgcgtcagcttgacgtcgggattctggatgcaggtatgcgtaacccatggcttacggtgatcgaagttcatcgacacttcgccgttatggatcgacttcaggtgctggtagggatcgttttcctccaggatgtggaaatagcggtcccactgcgcgaccggcttggtgtcgagcaggaagtcgtattcgttggcgagcgcccaccagacgttacgataggcggcaaggcgtgccgcgagataggcgacatagcggaagtcctgctcggccgacatgtccgcgtaaccccagcgatcgtaggggtggaacatgatgatatcggcctcgatgccgagcgcgcaaagggcggcgacctgctgttcgaaatggcggaacatgacagggttcggacgatcgaaatcttccttgccgtcggcgcccttctcgaaggaggggtaaagcggttcgttggtgttataggggtaatccttggggaacacgcccatccggatcttgttgaaaccggcggtcttcagcgtctcgagcgtctgcgcctgcatgtcgagcggctggtgcgtccaggcgtagcaggtcgtgccgaaagagaggaacggcttgccgtcggcataggcgaaatggaacttgttgcgcacgcgaaccgggccgtggttgcccttcaacggtgcggtcgcgacgaatgcgccggtcttgccgtcgagttcagccgtccgtgagcgcgtcttgaacgaccattcaccttcgatatcaggcatgaagcgcacgcggtagacgccatcgccatcatagaagcccggcacgcggacttcgcggctcttatggctaaagacggcgtcgaggctcacgtcgagatagggattgccgccggacgggccgttgaaggccgcttcgaacacaccccatttttcgactgttgctgtggacatgaaggatctcctcgaaagactttgaatttcggtcgctcagcccttgaccgcaccagaggtgaggccggagacgaagtaccgttggaaaatgagatagacgagcgtcgcgggcagcaccgtcatgacgatagcggcattcaactggccgtaatcgctggagaactggccctggaaggacatcagcccaagcggcagcgtccacatgtgctgatcctggagaaggacgagcgccatcgcgaattcgttccaggtggagacgaaatcgaggatcagcagcgcggccagaaccggcaggcagaccggcaggaagatgcgccggaagatggtaaagtgggttgcgccgtcgatcagcgcggcctcggacagttccttcggcaggcctttgaagaagccgtgcaggatgaaaacctggtagggaacgccgaaggcgatgtagggcaggatgacgccgggatatgtgtcgatcaggccgaacgaattgaccagcgtgaacagcggcgccagcataacctggaacgggatcatggtgccgaagacgacgacgagcagcaggagcttgcttattctcatcttgatcttcgccagcgcataggccgccatcgccgagatggcgaggcccagcggcaccttgacgacggtgatgatcacgctgttcatcagggactcggcgaaattgccgcggctccacgcactgctgtagttctcgaaggcgaactcgaccggcggcatgaaggcaccggtgctggtgaccgccgccttcgtcttcagcgatgtgaagacgatgaagacgaacggggcgaaccagatcaaggcgacgatgatcagcgcgatccagaggccaatcagaaccgggtcacggccgggcttgttcgtggcggcgatggtttcagacgcagagatcggtcctgtcgatgtcatcgtcattgttcggtgtcctcatgcttctgtgtccagcgcaggtacggcacgacgatcgcgatggtgatcagcagcagcacgaccgagatggcggcgccgcgtccgaagtcgaagatctgcattgcctgcgtgaaggcccagagcgccagcatctgcgtggattgtgccggtccgccgccggtgaggccgtagacgatatcgaatgccttcagcgacgagatgatcgagagaacgagcacgatggtcatcgtggtacgcagcgccgggaaggtcacatgcttgaagatcgcccagcggccggcgccgtcgatgcgggccgcctcgaccagcgtttgcgatacgttctgaagtccggcgaggaagagaaccatcgaaaagccgacggactgccagagataggcgacgaaaaccgagtacagcgcgatgttcttgtcgccgagccagtccttgatccacatctgcaggcccatattggtcatcagctggctgaacaggccgaagaaggggtcgtacatccacttccacatcgtcgcgaccgcgatcggcgcgatgatgacgggaagataaaagatggcgcgaaacgtattgcggccgaagatcttctgattgagcgtcaaggccagcagcaggccgaccatcggcggaaagaccaccgacatgatggtccagatcaccgtgttcttgaaggcgacccagaacaccggatcacgcgtgaagatatactggtagttcgccaggccaacgaatgggcgctgcggatcaagaccgttccacttctggaagctaagaaccacgacgttcagcatcgggtagagcgcgaagaccgcgtagatcatcatggccggcgccaaaagcattagtgcctggaagcgcggatcatgtgttcggtttttcaatgacatgggtatctgctccgcgcgacgtgtgtctggcgagtggcattggacgagtggtcggtccccgactgtggggaccgaccgatgtcccgggaggacttaggtacgaccggctatgaacgtctgcagctgcttggctgcatcggccggcgccgtgttgccggcggcaacgtcattgatcacgcggaaatattcggtcgtgacgtcaagcgggaaggcctggtcgccgttcatgtagaccttgccgtaggtcttgaagacgtcgagccattcggcttccagcggcttcagattggcatactggacgttcttgttgaccgatgtcgagctgatctggccgacgagatcctgctggaccttggtcgaaaggaagtagtcgaggaacttcgcggcgagatcgggattcgggctcttggtgctgatgtagttgtattcggcaaaaccgtagagccgctgcgtgttggtcgggaacgggaacatgccgtaatcgtcgagattggcgccgctgttttccagctggctgaccagccagtcgccttccagcatcatcgccgcgcgtcccgccgtgaacaggctataggactgcttgttgtcgatgcccatgaaaggctgcagcgtatagtccttcgtccacttcgcgaattccgtgaaggcgtcggtggcgcaagcctcggtggaccagtcggccttcatcgacttcagcgcatcgtgcttttcggcgccgcacttcgtttccaggatgacgtccatcaggcgcatgacgtgccagttgaccgacccgccgaaggtgaaggcgggaatgccggctgccttcagcttctcagcgtcggcgagaaactcttcataggtcttcggctcttccgtgatgccggcctgctggaacagcttcttgttgtagtagacggcttcgcccttgaaggtgaagggcacgccctgcttgccgccggcatagaggtcggcgaaggccgcggccgcgggcagaagctcatcgttccacttgtattcggtatagtatttgtcgagcggcgccgagaggccggccttcacatattcaccgccgaggccaaggcctgcccagctgaaatagatgtcgggacccttgttcgaaccggccgcgacgcgcaacgcggtcttgtgctcgtcgatgccgcgctgaacgatctcgaccttcgtgccgggattggcggcctcgaagtcggttgcgaccttcttgagcgcgacattggcggcgttgttgtcgaagttgagtgtccagagtgtcaggtcttccgctttcaggctcgtcgcggtgatcgcgagcacggatagcgtagccagaagtgtggtcttcatcgtcattaaaccctcccttgagcggtcctctccgctgatggttacaattccgaaaattcctgcgactgtcaatacttatttcgtactcgaacaaagtcgattgcatttcctccttcgtttcggcttaatagaacgaattgtccgatttttctcatgaaacaggccgcaatagtttccttctagaaatatgttgcgagcaagcggcgagtcagggctattgcaccgggaggagcgatgaatggttggcatcagggaacttttcgaggatcaggcttcgccggccgggcgcatcgtgcgcgctatcgcggcgatcgggtccgccaccgccacgcagctggtaaagtcgacggggctcgcgcgatcgaccgtatccacgcttctcacggagctgaaagacggcggcatcgtccttgacatggataccaagagcaacggtttcggacggccgtcgcagctgttgtcgctgaacccggcggcgggtcgttgcgccggcgtgctccttgggctcggcgaaatccggatcgccatctgcgacctcgcccacaccgtgttgtccgacatctggttcgcgatggacaaggactatacgcctcaagatgccgccagatgcgtgcgctccagtctggaggagcaatgcgccctgctcggtgtcgatatgtccgagctgctgggcgtcggcttggcgatttccgcgccggtctcctatgatggtgaaattctcaacggctccattctgccgacatggtgcgggaccaatatcgctgccgtattttccgagcagctcggttgtcccatccatgtcgagaacgagagccattgcggggcgctggcggaaatgacgtggggtgctgcggtgggcgaaccgaatttcgtcctgttcaagttcgatctcggcatcggcggcgccatcgtcatcgacggcaccgtgcagcgcggcgctcacggatatgccgccgagttcggccacatgtcgctggatccgcgcggaccgccatgtcgctgcggcaatcgcggttgtctggagactttcgccggcgggtttcagctgctcagatatgccgagcaatccttcggagagacaatcagcatagaacagttcgtggaacgtgcccgagatggcgaggccgcctatgcgcggcttgtcgatgatgcggccgagatggcaggctggggaatggggatcgccttcaccatcctcaatccgcccctgttcatcatcgccggtaaactggccgaagtgggcgagagtttcatcaatggtctcgagcgcagcttcgcccgccattccgtcgctcctcccgcgcattcgccggaaaagcgcaagcctcgcttcgtcgtgggtaccttccgcggtaacgacgacacggtcatgggcgcggtggcgctcgtactcaggcaacacggacgcatcaccagcgaggcctcgcccgcttcctgattgcctggatgggatttcggcgggcgctggttgcgctggcaacacggctttcacgccggccgtccggtttgtcgggtctggaaagttatcgctaagctttccagacatcggctcactccgaaagcgcgaccgaggtcgcctgatagggtgaaagcgtaagaacgccgcccatcagggcgtcggaaagcctcagcgagccgagatcgacctcctgatcgttagcggtgatattgatgatccagagcgttgcgcctgccgctgtcttcgtcgcgaacgccagaacgtgcgaggggttggaggagatgcattccctccattcggcgccggcgagaccggcgagcgtcttgaccgcgttgaagagcggtcggcgcccatcggcggcgaagggttcatccttgccggcgagaagaccgaaacttcccgttagagccgagagtgtcaggcattcgagctcggcgtccagcacctttgcgatataggccatcgcgaaggcttccgcgaaaaacccgttgtggcgcgggtcggtgttggccatcggtatgcgggcgcccttgggattgtccatggttcggctgccatagggattttgccgcatgggaatggtcgatggcccgatgcgatagggcttgtcgccatagatggcgcggaccgatcgcgtgatgaagggcagggcttccaatgtctgcatgacgctgaggtcgtcggcggcgtgcacgatgggattggtgcagtggctgatgaaggaaagcggcgcggaaggaacgcgcttgcgattgagctcggtgaaatagctgagcatgccgccgccgacgcggatatcggtgaatgccgcatgcgcggccgcgtagacttcttccagcggcgggcattccggccatttgctgcccggtggggtggattgacgatcgacagatggcgagatgatgatcgcgtcgggtttgaagcctgcatcgcgcatctgcgttgcgatcagactgggctcgtcgaggagcggctgcgtgcatggcagcgcgatctccagcgtcgaagtgccggaatgacgcttggcgacctcggcgaagcgctcgaaggccgccgccccatgccccgccgtcggatcgaaatggaagagaagttcctgcggcctgatctcgccgagcacggcgcttgccctgacaacggcgtccgcttcctccggcgttacgatgacgccgatcgcaggcatccgcccacgccgctcgccgagcgtgagcgtcgtcggcgatgagtggccgttcgtggtcgtggccgatgtattcgggcgcttgtcggcgatgtcgagcacgatgcgctgcttgaccgtttcgcctgcgggaatctggtagggccagggcagggcgagtggtcgcacgtaggtcttgtaggacgcatccgaccagttgcgctggtcttccatctcgaagacgtcgccttccatgccgcaccgcgccgtcacgttggtcatgacggtgtgggtgatcgcgctcatgttcatgaacggctgccacggttcgatcagatccggaaaccgggtctcgacgcgccttccatcggcatgctcgaccgtgacgggcgcacccgcgacgccgacgatcgggtggagaatgcaaaagccgcagcggttcgtttcaaaaccggtgccggagagcgcatccgcctcgaagatcagcggcgcgccggcttccgccgagatgcgcacgccgatcgcgagttcggtcgcgtcgggacccttgcaaacggcggtgtaacggacagaaaagccctcgccttgctgttcgatgatcaggtcggcgatatcgggcgcataggtgccccaatcgcgatcacgcacgagatacgagacggcgcgcagcacttccacgccgtcataggcgatcgtgcgcagattgccgtcgctgagatccgcggtcagtcggccggcggtgaggcggataggcttctgttctagcgcatgcgtgccgtagatcctgaagctgtcggacgacgtgctcatcgcagcatcgccttgacatcgaccgtctggccgctggcggcgctgtcataggcagcttcgacgagtgcgaaggtcttgaggttgtcggcgcccgaggtcgaggtctcgccgccggcggcgagccgctcggcccaatgctgctggatggcgtagacgctttcctggatattgtgccacgggcgggatgcccaggagagcagcgtcggcgacacgtccgagacctcggttccgctcttcccggttacttcgagcttgtagccctgcgacaggcggatgctgccttcggtgccgtcgagttcgatcagcgtctcggggaagggttcggtcgatagcttcgaggcatagctgacatcgacgatggaagtcgcgccgtttttgtggtcgagcaagatggttgcgacatcttcgcccttgatcctgggattgacccgcttcgtgcgggcgctgagcgccgccacgtcacccagaatgtagcgggcgatgtcgagcgtatggatgccgaggtcctcgatgatgaaacgctcgccttccgccagatagggctggccggagaagacatcgtagcccgaacggaacgagaagcggccccagaacggctggccgatcgtgccggcctccagaaccttcttcacggcctggatcggcgtctgccagcggaagttttcgtgcaccatcaagggaagtccggcatcggcgcaaaccttgaccatggccttggcgtcgtcgagcgtctttgcgaatggcttctggcagatcgccggcaccttgtgcgcggcggccatctcgaccagggcgcgatggctctggacggtggtcgcgatgtcgacgaaatcgaagccgccgtcggcgaacatctcggccgcatcgctgtagcgtctgctgatgccgaactggtcgccgacgatccgcagccgctcgggatcgcgatcgcagatcgccacgatcgaagccccggccacgtcctgccacgcatgcatctggttgaccgcaaaaaagccgcagccgatgagtgcgccattcaattccgtcattgcttaacctgcctttgccatttgcatgagagtcacgcgctgttgcagacggcgctgcgcctggtccacgaccaccgcgataataatgaccagccccttgatgaccatctgccagaaggacgacacacccatcatgaccagtccgtccgacaggatgccgatgacgaaggcgccgatgatcgtgccgccgatcgtcccacgtccacccgacatggaagtcccgcccaagaccgccgcagcgatcgcgttcagttcgaagctttcaccggtggccggatgcgaggccatcagctgcgacgagatgatgaggccgacgatcgccgcgcacaggcccgagaacatgtacacgaagatcttcaccacatcgacgcggatgccggacatgcgcgccgcgcgctcattgccgccgaccgcgaagatatgccggccgatcggcgtcgagtgcgccacgtaggcggcaagtagggcgagcacgatcagaatccagatggagacaggcaagcccagcacgctgccggcgccaagcacgtcgaagcccgttgtcgcgtattccggacgaccgacgagattggggaaggtacggccgtcggaggagagcagcgcgaggccgcgcgcgatataaagcgtcccgagcgtcgcgatgaaaggcgcgacgttgagcttggtgatcaacaggccgttgatcaggccgatcgccaggccgacggcaagcgtgatcagcacgatctcgtagatgttgaagaagatcgtgtagccgatcggcagcgccacgccattgaggatcagcgcgccggcgaccatgccgcacaggccgacgatcgagccgactgaaaggtcgatgccgccggtgatgatgacgaaggtcatgcccatggccaggaaggcgttgagcgcgacgtgtttcgacatcaggatcatgttggccgtggaggtgaaattcggcgcgaaaatcgcgaagaagatgatcacggcgaaaagggcgatgaaggttctgagcttcatcagcgtgaggagaatggagccgttcgaccgcttggccccgaatgtggaagaggtgtccgccgtcatgacgcgagctttccttggtgtccgtgacctttggcagatgccgcgatgatagcctcttccgttgcttcgcttctgtcgaagacggcgaccagcttgccgttgctgagaacggcgatgcggtcggaaagggccatgacctcttcaaggtcggaggttgaaaacaatattgcgaggcccttggcggccagtctgcgcatggtgcggaacacgtccgccttggcgccgacgtcgatgccgcggctgggctcgtccatcagcagaaccttcggattggtcatcagcgccttaccgatgaccaccttctgctggttgccgccggacatcgaggtgacctcgaattccgggtttggcgccttgatcgacagatcgcggatcatgtcgttgatgccctgcttctcggcattggccttgatgtgaaagatccgcgtgaagcgatcgaggcttgcgagcgtcaggttgctggcgatcgagagtacctgcaccagaccttcacgctgacggtcctccggtatgagggcaagtcctttcttgatccgtccggtggtgtcttgcgcgcgcacctcctggccgtcgatgaagatcttgccggtggagtgcctgtggctgccgatcacgcattcgaagaactcgctgcgtcccgcccccatcaggccgtaaatgccgaggatctcgcccgcccgcaccgagagcgatacatgatcgacagcgagcccaccggttctgcgcggcaggctgatgtcctcggcgcgaaaggcctccgggccgaattcatgttccgccgccttggcgaaatccttggcgtccgaaccgatcatcgagcggacgatccacttggtgtcgatgtcgcgaaccatcgcatggccggtgatctggccatcgcgcagcacggtgatgtaatcgccgatgcgcatcagctcttccaaccggtgcgagatatagacgatggcgacaccctgcgccttcaattcggcgatgaccttgaacaggatctcgacctcggcggccgaaagcgccgatgtcggttcgtccatgatcaggatacgggcgttgagcgacatcgccttggcgatctcgaccaactgctgctggccgatcggcagatcctcgaccatcgtctcggcgttgatgccggcgtccaggcggtccagaaacgcgttcgccttttcgatctgcgccttgtggtcgatgccgcgtatgccgcgggtgatctcccgggtggcgaagatgttctcggccaccgacatgttggcgaacaggttgagctcctggaagatcatgccgatgccgtgcgcctgcgcgtcggccggactgtcgaaggtgaccgtctcgccatcgaggatgatgcggccgagtgtcggccgctcgacgccggcgatgatcttcatcagcgtcgattttccggcgccgttctcgccgaccagcacattgaccgcgccgcgcctgagttcgaggtcagcgcgcttgacggccacgatgccggaatagaccttcgacacctcctcgaggcgcaggatgacgtcgtgttcgatcgtttcgcccatcgttacggccccaccgtcagttcggccggcgtgatcagcggcaattgtccggatgccggtagcggaaaggcgccggtaaccgtcaccgtcttgccggccaatccgtcgcgcggcagcggcgccagaagggtggtattgatcttctcgttgaacgccttgccgaattgcgcccactcgatctgatttttgaattcgttgaaattgacgaattcaagcgtgtcgcgcagcgccgttccgcgcacggcggggccgatctgcaccttcgcgtcggccttgccgtcgccatcggcgtccacgtcgatcgtggccgcgcgcgaggcggtatcggccgcgacgacctttccgctcagtttgaccgcataggtccacggcgcgctcgcctgcttgcgggtgttgccgaatttttcgccggcctggtccgggctggacgcggcaagcgccacgacatccttcagctcgccggcgcgcttctgcacatagggaattgcctgcgattgccagatggcctcgactttcgccgcgggatcgaaagcgttcttggcggtctccgccgccgtttcttccgccgtcggcgtcttgatgattttgcagcccggcagtgccatcgcaagcaatgcgatcacgaccgcgcttctgaccctcgccatccacgaaactccaatcttatggaataggataaagaacgaagagcgccgatgatcgcgctcttcgtcactggtctcaagccgttattacttgctgagcgcgaaggtctcgagcttgccggcgttgtcagcgttgatgagaatgcaatccatcagctgcttctcttccttgggaagagtcttgttcttgatgtaggcgtctgcctgttcgacagccatctgcgcctgtgcataggcgggctgcagaacggtggccttgatgccgccggacttgatggagtcgcggacgtcgttggaaccgtcgaagccgacgacgatcacgtccttgcggccggcggcctggagcgcggcgatcgcgcccatggccatcgtgtcgttgccggagatgacgccctggatatccgggttggcctgcaggatggtttccatcttggcgtaggcttccgtctggctccagttggccgactgcttggcgaccgacttcatttccggatagtcgccgatgacgtcgttatagccctgtgagcggatgccggcattggtgtcggactctttgccgacgagctcgacatagttgcccttctcgcccatcagcttgacgaattcctgcgcgccgagctgggcgccctggtagttgttggaaacgatctgcgcggcggcgacgcccgtggcgttgatttcgcggtcgatgaggaaggacggaatgcccgcgtccttggccttcttcacggcggcaacggtggcgtcagcgccggcgttgtcgagaatgatggccttcgcaccgcggccgatggcggtgtcgatcatctgggattgcttgttggcgtcgtcgtcatgggtcatgacgagcgtttcatagcccagttccttcgccttggcttcggcgccgacggcttcagccttgaagaacgggttgtcgtgtgcgggggtgatgatggcgatcaggtccgccgcgaaagcgggcatggcaacgccaagtgcaagcgcgctggcaaaggcagcgacggtcagtctacgtgtcagtctcatggtttcctcccaaaaagagccctgttcccagcagggcggtgaaaggggaggggttgccccctcccgggatcggtatcaggtgatacgcttgatgctgtcagcgatctcctgcggttcgaaaacgcgcttccagtcgtccttcatcagggcgggaatgccgaattcgatagccttgttgcaagcgtccgagaacacgccctggacttcgccgaagatgacagcgccgagaacgttcaggtggccgagcaggaagtcgcgggcagcttcttccggaacgccgcgtgcgacgcactcatccatggcctgcttcatgacgacgagcagcgaggcggcaacggtttccgacagacccggctccagcatcgccatctgctcgacggtgacgcggtgcgagcgcatgaccggcgcccagatcgtcttggcgacttcttcgccgacggcgtaggcttcttccggaccctgcatcagagccgaaacgatgtgctgcttggcgaagagaccgccgaagtggtccttcttggcctgcatgtcggtttcatcgttgaagatcggcggatggcacggatgcgtgacgaaatacgtcagatcaggacgctccgggaagtggccagcgaatggcgcggccgcgtcgagcgcgatgaccatggtgccggccttgagcttgtcggagatgcctgcggcaaccttgccgatatgcgtgtccggaacggccaggataacgacgtcggcgccgtcaagcgcaacatcaacgtcaacggtcgaaagaccgaggtcgtccttcaggcgtgccttgccgacatcgctgatttcgacgtggcgaacgtcgtagcgcgaacccttgaggtttttcgcaagccggtagcccattttgccgccggcgccgaacagagcaatggaagtcatgtttcctcacttcgtgttttgctggaattgttaacgttgctggtatgatgagtcaatcaccacgccaggataagtattacttaaccgcatcaagcctgttgatggcgtcgacgttgcctgccgaagcgccctgcgggtcgaattcggaggcaagccaggtgtcgacgatcgacttggcaagttccgggccgatgacgcgcgcgcccatggtgatgatttgcgcattgttggacttggcggcgcgctccgccgagtatgtgtcgtgcgtcagcgcggcgcggatgccgggaaccttgttggccgaaatcgaaacgccgatgccggttccgcagatgaggatgccgcgctcatgctggccgtcgacgatggtctgcgcgaggttctgcgacaggtcggcgtagaagccggactggctgagatcgtgcacttcgaggcccgccttggtggcgagatgggcggcgatcacgtcaagcaagggcttgccggcgctatccgctccgatggcgattttcatggtctgtgtcctttcaatcattcgggggctggatgagggattggtcgctgcgatcagatgaccgcggcgacgcgcttcagaatgtcgagatagccttcgacggcccaggccgagcggccgatgaacaatccgtcgatgtgtggctgcgtgatcagttcctcggagttttgaggattgacgctgccgccgtagagaaccggaaccgcgcgaccgagcgccttggcggccacgtcggcgatgcgcgcgtggcgttcgtcggcgtaatcggcggtcgccggaatgccgttcacgccgattgcccagacgggttcgtaggcaagcagaatttccgcgtccttgcctgatgtggtgacgcgcgcgagcgcgccttccacctggcgcttgagcaccgcgtcggcgtcaccggcgttacgttcgctcagcgtctcgccgatgcagatcagcgggatcaggccgtggttgacagcgctctcgaccttcaggccgactgtttcgtctgtctcgccgaagtgctcgcgacgctcggaatggccgagttcgacgatgtcgaggttgcaatccttcagcatcggggccgagatttcgccggtccaggcgccggccgcgtcccaatgcatattctgcgcgccgaccttcaccgagctatcggaaagggccttcttgacttcacgcaccgccgtgaacggcgggatgacgaagcgctggatatccgcgtggcgatcgccatcggcggctgcgagcttttcggcgaaggagagagcttcgccgagcgtcttgttcatcttgaagctggtgccaacccagtagcgcatgttcaagtccttcgtccgtcgcggatctgtgcgaaatagccgtcggttccgacctggccgcccttgagcgcgatctgcagcccgttggtcggcgcgtagttgccgtgcgcggtgcagagtggcgaaccgggggtctgtggcaatggcagcagcgtcgtcagagcatcgacgcgcagttcctgcagcgcgtggctcgatgtgtcgccgccggcgatgaccgcgcgcggcaacttctcggtttcgatcaaccggcgcaggatcgtgccgagagccgagccgaggcggtggcgcgatccggggatacgatcgatatcggtgcccttgtccgacgatgagccgagcgccgtgtgcaggatgacgctgcggccatccttcaggcgctggacgccctctgccaccgccgcatcgatggcgcgatcaccgctttcgccgacgagatccagcggatcgacagcgatgccgtcgaagccgttttccgtcgcgttgcggatctgccgttcggtggtgggcgatacgcttccggagacgacggcgaggcgatcgaccttgccgggctcggcgaaggttgtcggttcgccgagcaggccttcggccttccatgcctgcagcaatgcgtattcgacgcccgaggaaccggctgtaaacaggccgccttcgcgcttcgcccgccagatctgacggcccgccaaagcctgagacggggcgctatccacgtcgatcagcaggatgccgtcaagctccgccatcgtcttgtcgacacgctggtcggcatcggctgccgatatcgtcacgagatcggcgagcgccacgggcagcgctgtctgcttgccgagatgcaaggtgagatccgcttccgccatcggtgtgaccggatggcggctcatgacggggtggcgatcgatacggtagtagcgatcctggtaggcggcgaagagattgccgaaagccgtgaagcgcttcagctgcggcgcgccgacgacgacaggcacgaccggctggccgtagagcgccttgccgatttcgatcgccttgccgatgttgccgatcgcggggctggaatcgaaggtcgagcagaccttgtaatggcagatgtcggcgtcgagcgccttcagccattcgaagatcgccggcagatgcttttccatccattcaggtgtctcgctgcggctggtgccggcaatgccgaaggcgcggtaatcggcgaaacgcttggcggtctcggcgcttgggatgccgagaaagagcacggttggcacgccgttggaggcgagcgcctccatgacgtctgccgagccggtgaaatcgtcaccgtaataggtaagcagaggtttggtcatggtctcaagctgccttgccgtcgccgaatttcgcgatcgaggccgcgagttctggatgatccttggcgtattcgtcgagcgggatgtcggcgaccgccgcctgccaggcctgttgcacggcgcgcacgccagccgccgggccgccgggatggctgacgatgccgccgccgcatagatagagcagatcggtggtgcgaccggtgcgctggtaggtgtccggcgcctggccaccccactggccggagcctgcgacgggaagcgggcagtcggccttgctgaacagcggcgtgctgacggccttgaaggattcgacgaagctttcgtccggctcccaatacttgatgcggatgccgttgatctggaactggtcgacgccgagcaggcgccagaactgctggtagaccttgaaatcgaggccggcgcccggatcgcgggtcaggatatcccaaccgttgcgatgagcatgtagcacgaggcccgaccgcttgcgcaggaagctcatgccgccgaagccgatcgagttgatgttgacgacggcgcagttgccgccggccttcaggacgagatcgtgattgcgcatcatctcgtctggatcggcatgcgagatgccgaaggcgtacatgaccttcttgccggtcttctgctcgtgatcgaggatcctcggcatgatcgcctcgacgcgctccttgagcggcgaataggccgggctcatcagcttttcgtcatccttgatgaagtcgacgccggactcgatcagttcgccgacgagttccgcggtctcatgcgggcgcaggccgagcgccggcttgacgatcgtgccgatgatcggccgaccctcgacgccggtcagccggcggctgccgggcaggccgaactgcgggccgggatgggcggaggcgaacgcttccggcaatttcatgtcgacgatacggataccggtcatgcccttgatcgaaaagacgccgccgatcgcgatcgtcatcagggcggagagatcggtaccgatcgcgtccatcgggaaggcgatatcggcatcggcgcggtgaatggggccgtggccgggtgctgcttccggccaggtcggatgctccgcatcgggaaggtgacggatggcgataacgcgcgccgcgacgcgggccttcagttcttccgtctcgccgggaacggggacgaacgtaccggtcgactgatcgctcgcgatcttggcggccatggcctcgacgctgccggtcgtttcgatgcggtaggtgactgtgatcatcatgaggtttcgttgctcctcctgcctcggccgaaagtttgccatggcgtcaactcgtgaactggtataatgagtattccaatttctgcaacgaaaattttttgaaggaaccaccgaccgatttcagacgacggcctttcttgccgtaacgctagcatgcataaaggagggatattgtgagccagcgagacaccatgagccagccaatcgaacagatcgtgcgtcgtaaactatccgatgaggttttcgatcgactggagagaatgatcacgtcgggcgagcttcgccccggcgacgaaatgccttcggagcgggtgctgatggagcgcttcggggtcggaaggccggcgatccgggaggcgatgcagtcgctggccaacatgggattggtcaatatctcgcacggagagcgcgccaaggttctgcaactgaccgccaggtcgattttccgccaggtcgacctgacggccaagatcatgctggcgcagtccgccgactcgctcgaccatctgaagagttcacgcatattcttcgaacgcggcatggcgcgcgaagcggcggtcaaggccacgcccgccgacatcgatgaccttcgcgacatcgtcgaggagcagcgccgttcgctcggcaacgcggaggaattcatcgccgccgacatgcagttccatacgcggatcgcgcagatctcgggcaacccgatcttcgtcgccgtgagcgaggcgatgctggcatggctgaaggcctaccacacggacatgctgatctggaccggcaaggaaaagttcacgctggtcgagcatgaacagatactcgattgtctggccgccaacgatgcaaacggcgcggaagcggcgatcctgaagcacctcgagcgctccagcgcgctctatagcaaccgcgactgacgtttccggctgtcggcgtctgaagaggtacgcggatgcgtttgatcacggccgctcagatagccgcaatcatccggtctgcgtccattctcggctcaatgaagcgtcagcgtctcgggccgatgcgggtcgcgaaagcggaattgctcgatcagtgtcatggcttgctgcaacaggaactcggcggccttgagatcggtattcgcaagtccatgcacgctgccacgaatggtcagcgccaggttacccgagctcgcggcgaaactcgcattgccctctatcaatgcctccttggcactggtttcaagtgcatcggcaacggcggccaggatatcctgccgttcgcgcacactcatctgcacaatcgtcttcgatcccttcatatggacgacccccttccctgaaaggtgcacggcaacagccgccgataatgcttgatgtaggcgcgatcggcggttcatcaatgttcgcttgtttctctcttactcatgatccagaagcataagttcatgccgaaatcatgatctaatgcggccttgggcatggtgttagcttgctggctcgggcgtatccggcgtgcttgggagatatgggaagcatcgcgacttccgtcccagggtgccaaagtcacgtcccgctcataccgacgcaagacggcgagcgccgtcctcaaggagcataagatgcagaagcgaatacttggaaaaagcggacttgaagtatcggccctcggcttcggctgcatgggcttgaacttcagttatggcgacgcgctgagcaccgaggatagcgtgacgctggtccggcaggccgtggaacgtggcgtgaccttcttcgacaccgccgaagtttatggaccctacaccaacgaggagattgttggtcaagcactcaggccgatgcgtgaccgggtcgtgatcgccacgaagttcggctttaatatcgttgacggcaagatggccggcgtcaacagtcgccccgagcagatccgcaaggcggccgaggggtcgctgaagcgcctcggcgtcgatgtcatcgacctcctctaccagcaccgggtcgatcccgccgtgccgatcgaggatgtggctggcacggtcaaggatctgatcgcggaaggcaaggtgaagcatttcggcatgtcggagccgggcgcacagaccgtacggcgcgcccatgcggtgcagccggtcgccgcgctgcagaacgaatactcgctgtggacgcgcgggccggagaccaacggcattctcgaagcctgcgaggaactgggcattgcgctggttgcctatagcccgctcggcaagggcttcctgaccggcgcgatgaccagcgacacgaagatcggcgagggcgatttccgaaagctgctgccgcgcttcacgcccgaagcaatggcgaaaaaccaggcattggtcgatctcctgaagcgcatcgccgaagacaagaaggcgacaccggcacagatcgccctggcctggctgctggctcgaaagccctggatcgtaccgatcccgggcacgaagaagctgcaccgtctcgaggaaaacctcggcgcgacggacatcgcgctgagcgtcgacgatctcgcacgcatcgaaaccgccgcggccgccattcaggtcgagggcgagcgttatcctgagcagctgatgaagacgacaggtctctaggatacggacgttgagttgaaacatggaaacggtgcgcctcttttgcgccgtttccgcttggtaggctgactttctcggctagatccgttcggcgagaaaatcgatgagcgcccggatgcggctggcgagatgcgggtggccggggtagacggcgtgaatatgctcgatatctcccgggttgaacgcctccagcaccggtacgaggcgaccgtcgtcgatgtactcctgcacgtgaaacctgcccacccggataagcccgacgcccgccaggcaaagactgcgaatggtcggcccgttgttcacttcgacattgccatggaccgcctttgagaaggtctgcccggttgcggggtctcgaaacggccactcttcccatgtctgccggaagttgaatgtcatgcagttgtgccggtcgagatcggtcggcttctccgggtttcccatgcgctcgatatagctcggggccgccaccacgacgcgccggctgtccatcagcttgcgggccttcaacgacgtgtctcgcagattgccagagcggatcgcgacatcggcgcgctcctcgacgatgtcgatgatgccgtcggtcagggagaggtcgagctggacgttcgggtagcgggcgaggaactccggcaccagcggcacgacatggcgtaccccgaaggccaccgaagcgctgacccgcaaccgtccgcgcggcgcgacctcgccgcctgtcgacacgatctgttcggcctccttgatatcctcgagaatgcgctgcgcgcgctcgagatagacctcgccctccggcgtcagctgcaggctgcgcgtggtccggaccgccaggcgggtcttgaggcgctcctccagccggctcaccagcttgctgaccgccgaaggcgacatgcgcagcaggcgccccgcggccgaaaagctctgcagcctcgccgtatgcacgaagacttccatttcgccgacggtgttgtccacttgcctgttcctgtgaattcaattcataactgttgaggaaatgtagctgcttatcgtggtaatgtcatcgggccatattccagccatcccaactcgccgcttgtcggcatcgtcaatggatggattcacaatgccccttgccctttttgccttgacggtcgcggcctacgcgatcggcacgacggagttcgtcatcgtcgggctcctgcccactgtcgccaatgatctgcagatcgatctgccgcttgccggcctgatcgtcagcgtgtacgcgctcggcgtcaccttcggtgcgccgatcctcaccgcgctgaccggtcgccttgatcgcaagctgctgcttctcggcctgatggccctttttatcctcggcaacacgatggcagcgctcagccctggctacgcacctctgctcgtcgcccgtgttctctccgccttcgcgcacggcgtctttttctcggtcggctccaccatcgccgcggatctcgttcccgaagacaagcgcgcctccgccattgccatgatgttcatgggattgacggtggcgatcgtaaccggcgttccgcttggtacgctcatcggccagaccttcggctggcgcgcgacgttcgcggccgtcgccggcctcggtgtcatcgccttcgcgggtctctggatccttctgccgacaaacctcaagaaggcgcctgcggcgacgatcaccgagcaggtcaaggttctcggcagcggtcgtctgcttgttgtcttcgccatgaccgctctcggttacggcggcaccttcgtcaccttcaccttcctggcctcgatccttgagcaggtaaccggtttccaggcatcgagcgtcagcttgatcctggtgctctacggcatcgcgatcgccatcggcaacatcataggtggacgcctggcgaaccgcgatccgatcaaggctcttgcctggctgttcacggcgcaggccatcgttctcgccatcttcagcttcaccgccgtttcgccatggctggcgatcccgacacttgcggccctcggcttcctgtccttcgccaatgtgccgggcctgcagatctatgtcgtgcagctcgccggcgtggttcgccctgcagcggtcgacgtcgcctcggccttgaatatcgccgccttcaatctcggcatcgccgccggcgcctgggtcggcggcctcgtggtcgcctcgtcgctcggcctgggggccacgccatgggtcggcgccatcttcgtcgtcggagccctcgttctcacgctctggagcggcgcgctggaccgacggacgcttccatcgagcaagaccgctgcctccgcggcctgaggccatcagcctgttgaaacaaggagcggggggatctttgccctccgctccgcatctcgccggatcggcgctccgaaacgccatggcagcatacatcccacgttcacgattgtgtcacgaaagtgtcattcggcctgactataagcggctaaattttctccgttgattgtcatgacatccactttttctgcacaaccagccgccgtgtcggtgtcgggtctcagcctgcattttggccagaacgcggtcctcaagaacgtcgatctcgcgctcgaaaagggcaaggttctggcgttgctcggcccgtcgggctgcggcaagaccacccttcttcgactggtggccggcctgctggcgccgaccaaaggcaacgtaaggattaacggaagcttggtggccgatgccgcgggtggcctgttcgtgccgccggaaaagcgcggcctcggcatggtgtttcaggattatgcgctctggccgcacttaagcgtcgcggacaacatcgctttcccgctggagatgcgcggtgtcagccgaaaggactgcgagcggcgtgtcgcgacggccctcgagcgggttggcctcggcggcttcggcgcccggcggatcagcgatatgtccggcgggcagcagcagcgcgttgcgattgcccgcgcgatcgtcgccgagcccgccatcgtccttttcgacgagcccatgtcgaacctcgaccgcgagcttcgcgagaccatggtgcgtgagatcggcgcgctgatgtcggatctcggtctcaccgccatctatgtcacccatgatcagagcgaggcgttttcgctggccgatcaggtcgccgtgatgcgtggcggtgtcatagaacagatggcggcacccgagacgctggtgagcgcgccggcaacgcccgaggtcgcggaatttctgcgcctcggctgcgtcgttccggtcactcgcggggataacggtcttcgtctcaagcaaaccggcatcgtgctgaaggacgatacggcccccgctggcgcgacgcatgtgctgctgccgtctcaggccgtacgcctgacatcgggggaggggttttccgccgaggtcgtccactcgcagtttcgtggcgacggctatttgaccacggtcgcgcttggtgcgcgccccgatgcaagcgaactcacattcctggcgcgtcagcgcgttgtcgcgggcgaggtggtgagcctcgtcatcgatagcggggacatgcgctggttcacgcgtaaataaaacatatcaaccacttatggaggcacatatgagcagatcattcttcggtgcgggccttgccctcatcgccggcgtacttactgcaggcgtcgcgcatgcggacatcaccgtctactccgccggcccgggcagcctgatcgagaagctcgccgcgggcttcacgaagcagaccggcagcaaggtcgaggtattccaggcaacgaccggcaagatcatggcgcgcatcgaagccgaagccgccaatcctgtcgtcgacgtcctcatctcggcatcctgggatacggcgacggacttcaccaagcgtggttggctcgtttcctacaccagcccgaacgccgccaaggttcctgatttcctcaagtccgagacggccgtcgcacagggcgtgtccgcgctcggcatcgcctggaaccctgcaagcaacacgccgaagccgaccgaatgggccgacctcgccaagcctgagtacaaggatatggtcaacctgcccgatcctgcgcagtcgggtgcaagcttcgaactggtggctgccctctccggtagccagggctgggacctcttctccaagctcgatgccaacggcgcggttgtcgccggcgccaatgccgaagcgctgaacccggttctgcagggtgcgaaggccgccgtattcggcgcggtcgactacatctcgctcgccggcaaggcaaagggcgagtcgatcgacgtcatcttcccggcttccggcaccgtcgtcgccccgcgtccggcgatgatcctcaactggtcgaagcatcaggatgaagccaagcagttcatcgactatatgctgtccgacgaaggccagaagctggtcgccgccacctacctgatgccggcccgcagcgacatccccgccaaccgtccgctggttgccgatctcaaggttctgaagatcgatgccgctgccgtctatggcaagcgcgacgagacgctgaaggaattcggcaagatcttcgctgccggcaactgagactgaagagtatgaaagcgaacggcgcagccggcaccgggccgatagcatgggtggcgacatcgggtttgattgtcgtcgtggccgtgccgttcgtcttcattgtcctacaggcgattttccctgatctggggcggagttctcttgccgccccttttctgcatcttccgcagatgctgtccgatcccaagctcttgcggatgagcggcaactccgtcgttctcggcatctgcgtgatgttggcggcagccctgctggcggtgccgcttgccgtcttccgcgccctgttcaaggtgcccttcgcgatcttctgggacgtggcgctgctcgttcccttcatgatcccgccttatatcgcgaccctcggctggatcatgacgctgcagccgcgcggctatctgcagcagctgaccggcgtccacctcgcccccttcctgttctcactggcgggtatgacgacggtaatggcgctcaacacctttccgcttgtctacttcgcggtttcgcgcacgatcgaagcggtcggtgcgcgctatgccgacgtgggccgcgtgttcggcgcttcgtcctggcgtgccttctggcgcataacgttgccgctttcgacgccggggctggccgccagccttctcctcgtcttcgccgcggcgatcgaggagtacggtacgccggcggcgctcggtcgtcgctcgggtttcgacgtgctggtgaccgagatcgacctgcgcatttccgactggcccatcgaccttgccggcgccgccgtcttctcgctggtgctggtcattctgtcgcttgctgccttcatgacgcagcgttggatactttcccgccgctcctacgtgaccacgggaggcaagccgcaggccaaggacaagcgcccgcttggcgtgatgaccattccggttctgctgctctttgggctggtgacgacgcttgccaccgtgatcccgcttctggcgatcctggcgaccgcgttatcgaatacgatctccggcggcctggctatcggcaatctcggcttctccaatttcgcagcgatcgccgataacagcgcgggggcgttgcgggcgctcggaaacagcttcgcgctcgggttgggcaccgccttgctgaccggcatcctcggcgccgtctcggcctatgcggtggcaaagacaaagttccgcggccgcatggtgctcgatcttctgacggcattgccgaatgcccttccgggtgtggtcgtcgccgtcgggcttattctggcgtggaaccagccggtgctgccgatcacgccctacaacaccccgcttatcctgctcctggcctattgctgcatcctcctgccgcaaacgatgcgctacaccacggccgcgctgcaccagatcggcgacaatctcgaagccgccgcgcgcgtctgcggcgccagcgccttcactgcatttcgtcgcatcctgctgccgctgatcgcgccgagcctggtcacggcgatgctgcttgtcttcgcggtcgccacccgtgaactggtcgcgtcaatcctggtcgcgcctgtcggcatgcagacgatttcggtctttatctggcggcagttcgagcaggggtcgatcggtctcggcatggcgatggccttcgtcacggtggtgctgacgacgctgatccccttggtgctgctctcgctcctgcggcgaagcgggctcgtcgcggagtagttttacgcttccgtgccggtgctgacgtgccgcccgatcccttggttttgtccacagcgtttatgacctctgtgagcgttggtggtctccgcttgctgtttatccttgccgatcagctcgatttccccattgtttttacgggtatatccactcgattcgttcgctacggccgcgaaacggggacgacggcagagatcagggataatggcagaacagttcgacatgttctcgggcggcgcgagccagtcctccggacaaaccgcgcgcaaggtgccgctgaagaggcagcctccagtcgaggtcagcgagcagggcatggtcgattgcctgcttgaaacaggtcgctaccggatcttgaagaagcttgagccacgcgcggtcgcgacgacgaagcgcgccggctttccgctccgtggcgtcatcctcgataccgaaacaacgggtctcagccaccgcaaggacgagatcatcgagatcggcgtcatcgccttcagcttcgaccacgacggcaatatcggtgacgtcaccggcgtctacggtggtatgcagcagccgacggtgacaataccttcagagatcaccaagctgacgggcatcaccgatgcgatggttgcgggccaggagatcgatctgacggcgttgaaagccctgatcgagcccgccgacctcatcatcgcccacaatgccggtttcgaccggccgttctgtgaggctttctcgcagatttttgcaggcaaggcatgggcctgctcaaacgcggagatcgactggtctgcccgtggcttcgaagggacgaagcttggctaccttgtcggccaggcgggctatttccacgatggccatcgcgcggtcgatgattgcttcgcattgctcgaggtgctcggccaaagtgcgggtgccggcaccgcgttttcggaactctatgcggccagccagcacgcgcgcatccgcatttatgccgaaaacagccccttcgacatgaaggatcacctgaaggcacgcggctatcgctggtcagacggcagcgacggccgtccaaagtcgtggtgggtcgaagtggacgagggcgcgctcgaggatgagctcacctttctccggtcggatatctaccgctggccggatgccgaccctccaatccggcgcctgacggccttcgatcgcttccgggcttaactccgatattttcctcggcaggtggacctctgcatttcacgcatgggtggcgtgacgcattgtcgctgttttgcttggacaggagctcctatattagcgacatcaaacgacgctggagccaatcacggttgctgacgtcaaacgaacctcaggaaaggggatcaccatgaacgtagcacgcagcctgaacaactggcgcaagtaccgtcagaccgttaccgaactcggccggatgagcaaccgcgaactgaatgacctcggcatcgcccgcggcgacattcgcgccgtagcccgcgcttccgtggcgctgtaagtctttcgcaaatccatttgccttgagaaacgcccgctcgatcgcagcgggcgtttctgcgtttcggtcagcaaaatacgtcatacatgcgtcgggtttttattccatgcgcctgatgcatggctgcactgcacaataacgcctacaaaatgaacagaaaccggatatagtcattttcaacgaagcgatgcacctcctcccgcagagcttcgtggttcaggcgccccactcctcctcccagggtcgcctgaggaacaacagcactcctcctcccagctgttgttcggttcttttcgaaagcctgccgcacctcctcccgcggcaggctttttcgattctggaccatgcttgtcgacgtgaggctgacgctcgacgcgatgaagcgttgacactgtggtcacacacgcgaacctgtatccgccgccggaactgtgcgatgaagctaccattcgtcaatcacgctgccacggtgctaaatcatgaagaaaatcggcttcctctcgttcggacattggacaccgtcgccgcaatccggaacgcgctcagctggcgatgcgctgctgcaatccatcgatctcgcggtcgctgtcgaggagcttggggctgatggcgcctatttccgcgctcaccactttgctcgccagctcgcttcgccgttccccttgcttgccgcgatcggcgccaagaccagccgtatcgagatcggcacgggcgtcatcgacatgcgctacgagaacccgctttacatggccgaggacgctggcgccgccgacctgatttcaggcgggcgtttgcagcttggcatcagtcgcggctcgccggagcaggtgatcgatggctggcgttatttcggatatcagccgcccgagggtggttccgatgccgatatcggccgccgtcatgccgaagtcctgctcgacgttctgcgcggcgaaggtttcgcccagccgaacccgcgcccgatgttccccaatcctcccggtctgttgcgtctcgagccgcactccgagggtctgcgtgagcgtatctggtggggctccgggtcgaacgcgacggcggtctgggcggcgaagctcggcatgaacctgcagagctcgacgctgaaggacgacgagaccggcgaacctttccatgtgcagcaggccgcgcagatccgcgcttaccgcgaagcctggaaggaagcgggtcacgcgcgcacgccgcgcgtctccgtcagccgcagcattttcgcgctggtggacgaccgcgaccgggcctatttcggcggcagcggtcagggcgacgacaagatcggctttatcgacgagaagacgcgggcgatatttggccgcagctatgccgccgagcccgatgccctcgtgaagcagctggccaaggacgaagcgatcgccgaggccgacaccttgctgctgaccgtgcccaatcagctgggcgtcgattacaacgcgcatgtggtcgagcagatcctgacccacgtcgctcccgccctgggttggcgctgaatcgctttgccccaacggctacccgccaacagagatgccgggcctcgatgaggtccggcattttccttccggatgcacaggccggatcactcggccgcagccggcggcaccgccccgccgccgagttgcagcagcggaaccttcggtgagaagaagcgcggcttgtggaacttgcgcggcgcttcgcgcccgttcagcgtatagggctcgatgtcgccgatcagaaccgccggccgcgcgaacatgcgctgcatcagtccctggacggcgagaatggggaaggcccgcgccggcatcacctcgggcatttcgctgaacatgcgctgcaccatcttgcgcctgatatcctcggcgcccttcctgatctcgtagtcgtcgcgcctgtcgcgaacggcgacgatggcaagcgacaggccggcattcgcgcggtccatgctcgtgatctgcccggcgacgtcgaagttgtcgaagggcgcgaagatcaggatgtcgccgaggcgcatctggctgagcgcgctatcctcgttcatcgtgatcctggcggtatcgacagagatcgtatcgatcatgcaacgtgacgcctttccgccgctggcgatctggccttcgcgtgcaagcgaaagctcaagcttctccagtggcgcgcgggggagttcgatgcagacgagcatcgagacgaaggcgtagaccatgacgaccatgccccaggcgatgctgaagccgtcgagatcgttgtaagtgctgagcaacggcccgttgagcatgccgatgaaggtcagcacgatgatggcgaagaacgtcgcggcgatcgggtacagtatttccacgcgtccacgatcctcgcccttggccgtaaccttgaaggggcggccgaacggatggaacagggcgtggataagggcgatggtgatcgggatcgccgacaccatctgcgacacctcggtaaacagcggcaggctgcgccgtcctgaaacccaggaatggaacgtccacatggccgcgaccatcggcagtgcatagaggaagaacgcctccggctccatcaggatggcgggaaggccgaggaaatagaagagcagcggcgccgccatcaggagcaggatgaagggacggcagaaccagaagagcaggccgtgaaaatagtgcagccgttgcatcaaggtgtagccgcggccaaggaagggcccatccttgagcagtgccacctgtatcgtgcccaggcaccagcggcagcgctgggtgatatagccagagaggctttccgccgagaggccgacgctcaggcgttcgttgagccaacgcgtcttcaggcccttctgcatcagacggtaggtgaggtgaatgtcttccgtcaccgtttcctgcggcatgccgccgatcagttccagggcatcgcggcgcacgatacatgacgtgccgacgcagaaggcggcgccccagccgtccttggagggttgcatgacgtcgaagaagatgcgctgatcgtcgacccatgccttcgaggccagcaggttatgctggacgggatcggcattgtagtagaactgcggcgtctggatcaggccgatttcagtatcgatgaactggcctaccgtccgtttcaggatgccgcgttgcggcgcgaaatcggcgtcgagaatgaggatgaagggcgcgttggtctcttcggcggaacgcctgaccgcgttgttgatgttgccgcccttggcgccgacattgtcgccacgcctcagatagcgcacgccgatctcgttgcagtagtcttccagccagtcgcggcgtccgtcatccaggatccaaaccgtgaaattgctgtagtcgatcgccttggcggcgaggatcgtgcgctccagaatggagagctcttcgttgtaggtgcagatgaagacatcgacggccgggtgccgcgaatgctgcgcgatgagcgcttcgctggcgtcggcggcgtcgctgtggtcggtccgtctgaaaaagaagacgatcgacagcaccgtgtagaagatgacgaccacctcgaagccgagatagaagcgcggccagatcgcgtaggggctccactcgaaatccggcagggtcttggtgatgcggaaatacaggtagttcaggagcatcacgatcaggatcgtgccgaaaatgacccgatccttgccgcgactggcatccagcagccaggcgcagcccacgatcagggcgatcgccagcagtgagaagagaatcgagtccgacaaggttacgacttcgggggacatggactatccttgctgctggtcgtcgcctggccgttgcggccgacgaaggggttgatgccgagagcggcgagaacggcccaaccggtcgcacccacatgcggcagtcggtagtatttgaagtcgccgggcgcggagttcggcccgacctgcaggcctgttgtcagctgttcgttcgccgtggcgtagacgaggccgttgggcgcgcgctgcttggcgatcgtggcgaaaagcggttcggccctttcgggccgcccgatctcgcgaaacaccagggccgcctgcgccgtgccttcgagccagatgccgtcgcggtcgctgttgaaatcgtagccgccgtccactccgtggttgagatcggtccattccatgacgcggtcggccttggatttgaactcgggaaccgcgatcaatggccagagttcggcatcgaggcccgacatggccacattgggtgcgttgctgtcgggcgcgctgccgatgtagaagcggccctcggcctcgttccacatggccttaagaaactgcagggcgctgtcgccctgatatgcccagtcgccccccggatccagccgggcaagccagctgtcggcggcgtagatatcgaggttatgctccgtcgatttccaggtcatccgctccggcgtcggttcgtgaccgaagaagccgccgagatagccgacattcttcgggtcggcggtgttgcgatggatccaagtcatgatcttgcgggcggcgtcgagataagcctgctggttggtctcttcgtaggccatcagcatggcgagcgcgccccaggcggtgctgccggtggccgtgccgacctggtagccgtcctcgacccaggaattgctggccgtgctccaatagcccggaagcagcatgccgtccttgcccggaatgacggggcccgaccggtagccgtttcgcagccgcccgtcgttgtagcggcggtcggtctcgagcgcgaccaccagcgcatcggcaacccggcgggcctcggctttgcgctgacagccgtagagcgccatcatcacaagcgcgttgtcgtaggtgaagcccgtgttctccagcgacgggtgcagagccgagccgccattggccggctcgtaactgcggaacacgaagggctgctccggctcccctgtcatcctcgccgccagcgcgtcgcacatcgagcaggcgagctgcttggtctcggtatcatcggccttggcagcgccgattgcgattgaaagcagcagcgcggccagcagcgatgcgaccaacccgcgccaaacctcatgcattgacgagttcatgcccttcattttcgcccctcgcgatacgcaggtaaacgttcagcttggcccttcagggtgtcgcggtctggtcggccggcaatcgcgggccggtggtcttgtccagcgatgcggatgcggagagaatgctgaccggtgacgtcagcccggcaacgacggccttcgagtaccgcgcgagacgcgaggtgatcgtctcgccgagcgagacaatgacctcttcgccgacgttgcagccgaagaatttgtcgttgttttgcttggccacgctgccgtcctgcgcggtctgttcatcgatcttgacgagaacatagacctcatggccctcggcctcgggaaatttcgcgaaatagcggttctctggcccggaattgaagtatcggacgattttgtagatacgcccgctgcgcttcacgccaaggctgcggaagttgaccatggcgggcgtgccgatctcgagcgcggtcacgtcgcggcttcggtaaacggccgcggcgaaagcttcggtgcagtcgagagacttggcaacgggctggccctgcatgacgaaatcgccgaaggatgcgtcgacgctgacgatctggccgtagcgttcggcggtgacttcggccgcgccggtcttgcccaggcgtccttcctcacgcgcgatcaggttttcgacctgttgcttgcgctccgtcatctggttgatttcgatattgtcctcggcgatgtcgcccgcgagcttcgtccgctgcatctcgagtgtcagcagattggcggcgacggtgcctccggtatagatgtcgcggccgacgagcgactgtacgatttcgtttcgacgcagttcgcccttggcggaatcgagttcggcctgggcggcgttgcgcttctgacgctgcggctcgaggctcgtgtccgatatcaggccctttttgagcagtgtctgctgccgcaacaacagcgcgtcctgctcgttgaggcgggcctgataggtctgcacattgaattgggaattgacgatcaccgccgacaactcgctcaagacgccggccttgacgctgtcgatttgcgtcttgaccttgttgagctgctcggtgcgctcggccgccacgctggtcgtgttgttgagcttttcggtcagatccagcttctcgagccgcaacccggtcagcgatgtctggtcctggttgggattggataccgtcgccatgacatcgccaagattgacgacctgtccgacctgcagcgaaatcttgtcgacccggccatagatgggcgaggcgatcagctgcaccggtgcgttgatcaccgcccgtgtcgagacgatgaagaactggttggggatcatcgccatcgcgatgatgaagatcagcataaatgcgaacgcataacctaggatacgcgatacagacagtatcttacggtccctcggatcgatactcgtggttgcggccttcattttcttcaatcctgacatcatcatgctgcaggtaacttgaagggcgtttccggggtggtgttttttattttgaatgtcttttatagcagtaaaaatattcaggcaaataaaatgtgtgcattcaaaatgatgtattgactgaaaatttctatttaattcggttgctgttgcaataatgacagcaatagttgatgaaactattcatccttgttcgtttggtgctctttatttgtgacggttttatatcgtttcttttacgactcaatcaacggtagaattttcgccactgctccttaccatgatatccagaacggcggtaggccgcctcgatgtcggcgtcatcgacgtgccggagcaggcgcagggccgaggcgcggccagcctcgttgctcccgcgggcgctcgacaccgcgctcgatacggttcgcggccctgttgcgtcgccggcggcgatcctgaaggcgctggtcggcctgcggcacaatctgtttcccgacgccgacccacctcacgatgtcgagccaccgacgctgcgggaagcggcggagtagggtcgttcatcggaaagccctccatgcatcttgcattccacgacggtgtcgtgaaagggatattcagtcctctataaaccggaagatgtctgtgaaacccggccgcgtcacctcctacactctgcgtgcgggatatttcgtccttggcatcctgatgctggtcctcgcgttcatcggcgcgctgctgccgctgatgccgacgaccatcttcctgatcctggccgtctggtgcttcacgcgttcgtcgccgcgcctcgaagcctgggtgctgaaccaccagacgttcggaccgacgctgcgtgcgtggcatgaccaaggggcgatatcgcggcgcgccaaggccatggcgctgaccggcatggcggcgggctacgtcctgttctatctcgccgccagccccggaatattgctcgcgcttttcgtcggcttcttgatcggatgctgtgctttctacgtcgggtcgcggccacttccatccgcaccaccgccgccgccgtcggacgccaatcatggcgcggcgtcggaaaagcctggggactgatcttgccctgatgatggcgaccgcggtcagcgagccttgccgacgcttgcatacatgcccgtcgtccggaattccgtcgggttggtgccatagacgcggcggaacaccttggagaagtagttggcgtcctcgaagcccgagcggatggcgacctccttgaccggcatgtgagcggtcttcgtcagcagcttgacggcgcgcttcagccgcttctgcagcacgtattcggcgggcggcagtccttcgttggcggcgaacatgcgcgagaaatgcgcgcggctgaggcctgccacccttgcgaggtcctccaccggcagcggcttttccagattgtcggtgatgtagtcgatcacgtgctgcatcgtccggtattcctcgctgaacacgggatgcgatccgaacacgtcgtcatagagcgccatggccgcctcgtaggcgatcgatgatgccagtcccggcgtttcggcgcccgatatcaggcgcaggctgcaatcggcgaggtgctcgatcgtctgcggctgcagcttcaggatcggacccgtgacggcgaggatggatcggtgaatgcgcagcgcctcctcgccgttcatcgatatccagaaaaattcccagcgatcgccgtcctccagccagtagcggtgattgtgcggtaccagcacgagcagcgtctcgccctccttcacccgcagttctcgattctcgtaacgcaggttgcccgcgccgctgatcgtatgctgcaacacggtaaaaggcgtctgcccacgcttgcgtccgtcccagtcataggtagcattctcacgcacctcgtaaccggtgcttgtcggcatggtgtgcagggattgtcggccgcgtggcagggaaaccgtgcgcatggacggtccacgatcgatcaattctcgcagcacagaattacccatgaaagcataatccttctctggcggccccgaagattttacgcataatccgccccaagagagagaacaccgccgggcttgaagagcggcggggaggagaataggccggatttctggcctttttcggcgctggacgcaagcccgccgcctattcttcttcctgttatccaatccgggcactttgatcgcatcgaggttaggatcatgagtttcaaaatcgctatcatcggcgcaggcagcgtcggtttcacgaaaaagctgttcaccgacattctgtgcgttccggagttccgggacatagagttcgcgctcaccgacatgagcgagcacaatctgcagatgatcaagcagatcctcgacacgatcgtctccgccaacaagctgccgaccaaggtgacggcgacgaccaaccgccgcgaggcgctgaccggcgcccgctacatcatcagctgcgtgcgtgtcggcggtctcgaagcctatgccgacgatatcaggattccgctgaaatacggcatcgaccagtgcgtcggtgacacgatctgcgccggcggcattctctacggccagcgcaacatccccgtcatcctcgacttctgcaaggatatccgcgaagtcgccgagccgggcgccaagttcctgaactacgcgaacccgatggcgatgaacacctgggcggcgatcgaatacggcaaggtcgatacggtcgggctctgccacggcgtccagcacggcgccgaacagatcgccgaagtgctcggcgcgaagtcggtttccgagcttgactacatctgctcgggcatcaaccaccagacctggttcgtcgatctgaagctcaatggtcgcaagatcggcaaggacgaactgatcgccgccttcgaggcgcatccggtgttctcgcagcaggaaaagctgcgtatcgacgtgctgaagcgctttggcgtctactcgacggagagcaatggtcacctgtcggaatacctgccctggtaccgcaaacggccggacgagatcaccaagtggatcgacatgtccgactggatccacggcgaaaccggcggctaccttcgccactcgacggaaacccgcaactggttcgagacggaattcccgcagttcctcgcttcggccgaaaagccgatcgatccggccaagcgttccaacgaacatgccagccatattctcgaggcgctggaaaccggcagggtctatcgcggtcacttcaacgtcaagaacaacggcgtcatcaccaacctgccatccgatgcgatcatcgaatcgcccggctttgtcgatcgcttcggtatcaacatggtctccggcatcaccattccggaagcgtgtgccgcgacctgcatggcctctatcaacgtccagcgcatgtcggttcatgccgccatcagcggcgacatcgatcttctgaagctcgccgtcctgcacgacccgctggtcggcgcggtggcgacgccggaagaggtctggcagatggtcgatgaaatggttgtcgcccaggcgcgctggttgccgcaatatgccgacgcggtcccggccgccaaggagcgtctggcgaagtcgacggtgaagacccgcgaatgggccggcgcggcacgccgcaacgtccgctcgatcgatgaactccgcgccgagaaggcggcgctcaagcaggccgtgtaagcttccccggaggacgggtggctatggcgttccaaggaggggacgccatagccgaaagcccgtttccggatcgttgaggagaaccggggcagccgacaagcgcctcgataccaaaaaagggagagacgatgagatattaccgcaaccttggtattctggccggactggcgctgagcgtctcggtctcggctttgagcgcctacgcctccgagccgacgacaccgcctgctccgccgccgtttccggcggaaggcaagatcaattacgtatcgagagactccatcgaggagttcaaggcgcttccctcttataacgagccggactgggtgaagaagaacttcgtcgacaccggcaagcttcctccggtcaaggaccgtcttcccaaggaaccgctggtcttcaagaccgacaacatggtcgatggcaccggcgtctatggcgacacgctgcgccacgtcatcggcggccggcccgagggatggaactacggcgccggccagacgcaaggctggggcggcatcgacatcggcctctccgaatgcctgacgcgcaccgcaccgctcttccaggttcaggccaaggataccgaaccgcttccgaacctcgccaagagctgggaatggtctcaggacggcttcaagctgacgatgcgtcttgtcgaaggcgcgaaatggtcggatggcgtcccgttcaccgccgatgacgtcatgttctattgggaagacgaagttatcgatcccaatgtttcgccgctcggcggcggcgcttcgcccgaagctttcggtgaaggaaccacgctgaagaagatcgacgactacaccgtcgaatggaccttcaagcaggccttcccgaagcagtatctctacacgatggcctatccaaacttctgcccgggcccgtcgcatatcctcaagccgcagcatccgaaatattcgaagaacacctacgaccagttcaagaacgccttcccgcccgaatacatgaacatgcctgtcatgggcgcctgggtaccggtcgaatatcgccccgatgacatcatcgtcatgcgccgcaacccctactactggaaggtggacgagaagggcaaccagctgccttatctcaacgaggcgcagtacaagctctccacctgggcggaccgcgacgtacaggccgtggcaggctcgggcgacatctcgaacctcgagcagccggaaaacttcgtggcctcgctgaagcgcgccgccgaaaagacggcacccgcccgtctcgccttcggcccgcgcctgatcggctacaacatgcgcatgaacctttccggcaacggctggggcgaaccggatgcccgcagccaggcgatccgcgaactgaaccgcaatgtggatttccgcaaggcgatcaccatgggtctcgaccgcaaggcgatcggcgactcgctggtcaagggtccgttcaccgcgatctatcctggcggcctgtcctcgggcaccagcttttacgaccgcaattcggtggtctactatcccttcgacctcaacggcgccaaggcgttacttgaaaaggtcggcctgaaggacaccgatggcgacggcttcgtgaacttcccggccggcacggcaggcggcaagaacctcgagatcgtgctcctggtcaacaacggctacgccaccgacaagagccttgccgaaggcgtcgtgggccagatggaaaagctgggcgtcaaggtcatcctcaatgccctcgacggtccgaagcgtgacgacgcgcactacggcggtcgcttcgactggctgatccagcgcagctcgccggaactggcttccgtggttcagaacaccgaacagctcgctcctgttggcccgcgcaccagctggcagcaccgcgccggcaaggacggcaaggtggatctgatgccctacgagcagcagatggtggatatcgtcaccaagttccagacgagccaggacaacaacgagcgcgtcgagctcatgaagcagtaccagaaggtcgcgaccgaaaatgtcgataccgtcgggctcacggaatatccgggtgcgctgatcatcaacaagcgcttctcgaacgtcccccagggcacgccgatcttcatgttcaactgggctgaagactccgtcatccgcgaacgactgtgggtggctgccgacaagcagggcaaatacgaactgttccccgaacagctgcccggcaagcccggcgaaaagggtccgatcaactaggttctcctcccgaagaaacggaccggccgcgcgtgatgcgcggccggacaagatcaacaggccggccgcaccgaagggcgcgactggcagtaaggagagacgagcccgatgttacgcttcctgctcgtgcgcatagcgtcctctatcccggtcctgatcatcctgagcatcgtgacgttcgcgatcattcaggctccgccgggcgactatgccgactacatccgatcgcagctgatcaaccagagcggcgcatccttcgaagccgccgatgcgcaggcccaggcctaccgtgtcgccaacggcctcgaccagccgatggtggtccagtatttcgcctggatgaagggcatcatcaccgaaggcgatttcggctacagcatgttctacaacaagccggtcgccgacgtcgtggccgagcgcctgccgcgcacgctgctgctcgctctcgtgtgtcacattctcgcttcgcttctcggcatcggcttcggcatatgggcggccacgcgccagtacagctggatcgacagcctgctctcgggcatctccttcctgggtatgacggtgccgcgcttcctgatggcgctgatcatcgtctacctcctcgtcttccagttcaacgtctcggagatcggcagtttcttctcgccgcaatatggcggcgcgccgtggtcctgggacaaattcgtcaacctcgtcagccacgtctggccggttgtcgccatcgccaccttcggcgggcttgcctacaacatgcgcgtgatgcgcggcaacctgctcgacacgctgaacgcccagtatgtcgagacggcccgcgccaaggggctgtcgggcagcgcggtcgtgatgcgacatgccgtgccgaacgcgctccatcctctcgtcatgtaccagggtgtcgtgcttccctacatgctgaccggcgaaatcgaaacggcgatcatcttctcgctgccgactgtcgggcccgccatcgtcggctccatggcgatcggcgacgtttatgtcaccgccaccttcatgatggttctttcggcgacgctgatcgtcggcaacatcatcgccgacatgctgcttgccatgctggacccacgcgtccgccagtacggaggagcctgatatgctcgccttcgattccgctcccccgccgccgcacgaagagaccgtcaaaggccagcagaacggcaatgaaagctacctgtcgctggtctggcgtcggctccgtcggtcctggaccggcatgatgggcctcgttctcgtcggcctgttgctcctgatggccgtcttcgccgatttcttcgcgccgatggaccccaaggccaccgataccggcttcgcgccgccgcagatggtgagcttccgcgacaaggagggcagtctcacctatccgccgcgtgtctatgcgctgggcgaatccgaagagctcgacccggtcacgttccagccgatcgtcggccccgattacgacaatccgcgcatgctcggcttcttcgtgaagggggcggactacaagcttttcggcctgatcccggcgaaccgtcacttcttcggctcggtcgatgggcagccggtgcatttcctcggtaccgacaagttcggccgcgacgttctctcccgcgccatcatcggctcgcgcatctcgctcaccatcgcgctgaccgtcgtcttcatcgtcaccgtcatcggcaccacggtcggcatggtttccggctatttcggcggcgccttcgatgcctgggtacagcgcttcgtcgagatcgtcctcgcctttccgcaactgccgctctacctggcgctgacctcgctgattccggtgacggcgccgaccaacgtgttcctcgccttcgtcatcgtcgtcatgtcggcgctcggctgggcacagatgtcgcgtgaggtgcgcggcaagacgctggcgctcgcccgcatcgactatgtgcgcgcggcgatggccgtcggtgcgaccgaccggcgcatcatcttccagcacatcttcccgaacgtgatgagccacgtcatcgtcgccgtcacgctgcatatcccgagcgtcgtcctgctcgaatccttcctcggctttcttggcttcgccgtaaagccgccgctgatctcctgggggctgatgctgcaggacaccgccaattactcggtgatcggcacatacccgtggattcttgcccccgtcggcttcgtgctcgtcaccgtattcgcgttcaacgcgctcggcgacggtctgcgcgacgcggtcgatccctattgagtgaggtgaagaacatggctctcgcactcgtcaactcgtttgccccgcccgtccgcctcgatcacgatgcgcacaaggaaagccccgtcatcgacgcccgcaacatcggcgtgaacttcaaggtcgagcatggcaccgtggaagcggtgaaggatatctccttccagctctaccgcggggaaacgatcgccatcgtcggtgaatccggttcgggcaagtccgtcaccgcccgcaccgtcatggggctcctgtcgaagcgcgccgtcgtcgcgccgaaatcgaccgtcgaatatgacggcgccaatatcctgaaatatcccgagcgggagcgccgcaagctgcgcggcgaccgtatctcgatgatattccaggagccgatgagctcgctgaacccgatctacacgatcggcagccagatcgtcgaagccatccgtgtccatcagaagatgagcaagaagcaggctctggccagggcgctcgaacttctgaagcaggtacagatcccagatccggaagcgcgcctcaagcagtatccacaccagctttccggcggccagcgtcagcgcgtgatgatcgccatggcgctttccaacaatcctgacgtcctgatcgccgacgagccgaccaccgcgctcgacgtgacggtgcaggcacagatcctcaatctcatccgcaatttgcagcaagagaggcggatggcggtgatcctgatcacccacgacctgacggtggtgcgccagttctccgactacgtctatgtgatgcagcacggagaaatgcgcgagcacaacacgacggaaaagcttttcgccaatccgcagcacagctacaccaagcatctgctaagctcggagccgcgcggtcaggcaaacccgctgcccgagggatcagaaatcatcctcgacgccaagggcgtgcgcgtctccttcatgatgcggcacggcaccttcttcaagccggagctgaaggaactcgttgccgtcgacagcctcgggctgacgctgcgcaagcatgaaacgctggggctcgtcggcgaatccggttctggcaagacgaccttcgggcaggcgctgctcaggctgaacgacgccgagaatggcgagatctatttcgaccgccagccgatccatggcaaatctcgcgccgagatgcggccgctgcgctcgcgcatgcagatcgtcttccaggacccgttctcatcgctcaacccgcgcatgacgatcggccagatcatcgaggaagggcttgtggtcaacaagctcggcgcgaccaaggccgagcggctggaccgcgtgcgcgaggcgctgatcgccgcgggcatgccgggcaatatcctgtcgcgctttccgcacgaattctcgggcggccagcgccagcgcatcgccattgcgcgcgccatcgcgctcgagcccgaattcatcctgctcgatgagccgacatcggcgctcgacctctcggtccaggcgcagatcatcgagctcttgcgcaagctgcaggatgaacgcggcctcagctacctcttcatttcgcacgatctgaaggtcgtgcgtgccctctgccaccgggtgatcgtcatgcagcatggcaagatcatggaagagggacccgtcaacgaagttctcaccaatcccaagaccgcctacaccgaacggctcgtcaaagccgctttcgaagtagcctgattgccaatgccggaggatattatggcaagaaaccccaagatcaccttcatcggagctggttccaccgtcttcatgaagaacatcatcggcgacgtgctgcagcggcccgcgctgtcgggcgcgaccatcgccctgatggacataaacccgcagcgcctggaagagagcgccatcgtcgtcaacaagctgatctcgacgctgggcgtcaaggccaaggccgagacctattccgaccagcgcaaggcgctcacaggcgccgacttcgtggtggtcgccttccagatcggcggctatgagccctgcacggtgaccgacttcgatattcccaagaaattcggcctgcgccagacgatcgccgacacgctcggcgtcggcggcatcatgcgcggcctgcgcaccgtgccgcacctgtggaagatctgcgaggacatgctcgcggtctgcccggaagcgatcatgctgcaatacgtcaacccgatggcgatcaacacctgggcgatcgccgagaagtaccccaccatcaagcaggtcggcctttgccattcggtgcagggcacggcgatggaactcgcgcacgatctcgatatcccctacgaggacatccgctaccgctcggccggcatcaaccacatggccttctacctgaagttcgagcatcgtcagcccgacggttcctacaaggacctctatccagatctcgtgcgtgcctaccgcgagggacgtgcgccgaagccgggctggaacccgcgctgcccgaacaaggtgcgctacgagatgctgacccgcctcggctatttcgtcaccgaaagctccgagcacttcgccgaatacacgccctacttcatcaaggagggccgcgaggacctgatcgagaaattcggcatcccgctcgacgaatatccgaagcgctgcatcgagcagatcgagcgctggaagggccaggcggaagcttatcgctcggccgacaagatcgaggtcaagcagtcgaaggaatatgcctcctcgatcatcaattcggtctggaccggcgaaccctccgtcatctacggcaatgtccgcaacaacggctgcatcacctcgctgccttacaattgcgccgccgaagtgccttgcctcgtcgatgcatccggcatccagccgaccttcgtcggcgacctgccgccgcagctgaccgccctgatgcgcaccaacatcaacgtacaggaactgacggttcaggcgctgatgacggaaaaccgcgagcacatctaccacgccgcgatgatggacccgcacacggcggccgaactcgacctcgaccagatctgggcgatgacagacgaactgctggccgcgcacggcgactggctgccggcatgggcgcgcaccgcgcgcaaggttcaggccgcctgaccaactctctcccggtcacggcctcaagaagtcccgcggctcagccgcggggcttttttcatacgtgcatggcctgaacgccgcgcgaatcccccgcgccagcgaataattgcatttttcgcaattcaatctcaattattgtttcaattgtggctgagcgtaaatcccggcattactgcgtcatcagaacaacacgccgccccgctagacggcagcggacgaggtcgcaggagcagacatgataaacaatgaactttccatttcccggcgtggtgtcccgctttcaggagcagccctcgccactgcgatagcccttcctgcgacctccgctttttccgcagaccatatttccacaaccactcacttcaagaaggatatgaccatgagcactgtaaccaccaaggacggcgtcgaaatcttctacaaggactggggttcgaaggacgcacagccgattgtcttccaccacggctggccactgtcttccgacgattgggatgcccagatgttgtacttcctctcgaagggctatcgcgtcgtcgctcatgaccgccgcggccacggccgctccgcccaagtcgccgacggtcatgacatggatcactacgcggccgacgctttcgccgtcgtcgacgcgctggacctgaagaacgccgttcatatcggtcattccaccggcggtggcgaagtcgcccgctatgtcgccaagttcggccagccctccgggcgtgttgccaaggccgtgctcgtctccgccgttccgccgctgatgttgaagaccgagagcaatcccgaaggcctgccgatcgaagtgttcgatggcttccgtgcggcactggcagccaaccgggcgcagttcttccgcgacgttccggccggtccgttctacggcttcaaccgggatggcgccaaggttcaggaaggggtcatccagaattggtggcgccagggcatgatgggcggcgccaaggcgcattacgacggcatcaaggccttttccgagacggaccagacggacgacctgaaggcgatcaccgttccgacgcttgtcctgcacggcgaagacgaccagatcgttccgatcgcggattccgcactgaagtcggccaagcttctgaagaacggttcgctcaaaacctatccgggcttctcgcacggcatgctgaccgtcaacgccgacgtcctcaatgccgacctgctggctttcgtccagtcctgataaaagtcccgcgcgcggcgaacattcgccgcgcccgccaatacgaacacttgccgcgaggcggattgataagatgatgcagcttacgcccgaactggtcgccctgaccatcagagacgtccgcgatgacggcccggaaccaggctggacaccgatatcggaagcggaaatcgatcatctggtcgagtcgatcgaaagcgatgctggaggcgagccgatctgggtattcgcctacgggtcattgatctggaacccggaatttgaggcagcagggcgccagcgcgccaccgcctatggatggcatcggtccttctccctcaagatcgagcgttggcgcgccaccaccgcgcagcccggcctgatgctggcgctcgagcgcggcggccagtgtgacggtgtcgtgtttttgttatcggaggagcgacggcgccaggatctgcgggctctcgttgcccgagagatcaggtaccgggaggtcacggacatggttcgctggctgtcagtcaagacacccaatggcatgcgcaaggccttgaccttctgggcaggcggcaagcgggctggactgacgaagctggtaccgctcgacgaggccgcatcgcttatctccggcgcatgtggagagggcggctcctgcgctcagtatttgcgcaatacgatcgtggaccttcaggcggagggaattcgcgatcgcaatctttggcgtctgcaggcgctggtggcggccgagataagcgcgcgtcaaagcgatgcgccacgttttcacgaaggccggctggccaacggctgaaacgctgtcggtggtctttcggccagcggacaggaagacatggtcctcccgatgaagccggttcttgctgattgccgtgcaaattgagccatggcattcatccggaacttccggtatatattaacaatcactaaataagacggattgtgttccttgagggagggcgcgatggggatgtttgcgaccatttcggcggtgatctcgagcgccgggtccggccactctggcggccggctgcatacgccggcccttgtcatcgtcactaccatctcggcaatatgcgccgttccagtcctggccggcgcccagcagccgaccgatgcacagcgcaatgctattcgttcggcctgccgggcggatttcatcgcccaatgttccggagtaacgccgggcggcatggaggctttgagctgtcttcagaagcatgacgcctcgctttccaagccctgccgcgatgccatctccgcggtggagggaacgaagaagagctccaacgatacggcgcctgcccaagcccccagcgcacagcaaacgaccgctgcaacgccgcccgccgcgccgggacaggctggccagcccaccgcggcgcagcgcgatgcggtcaaatcgtcgtgccggtcagatttcatcgcccagtgccccggggtgacgcccggtggcgcgcaggcgcttgcctgtctgcagcagcacaacgcaacgctctcgccatcctgtcaggcggcggtcggcgcgatcggcggagccgggccctccacggcggcaggcgccggtagcgcggcgaggggtgccgtgcctgcggtgccaatggcatcgttcacgccacgagaggaactcatcgtcatgcgtcgcacatgcggaccggacttccgcgccctttgccatgcggtcccgcttggcgggggacgcggtgttgcctgcttgcgggataatttcgcgcggctttcgccgccatgtcagcgggtgttgagcaacggcctgtagccgctgcagccattcatatcacattgagtgcaacgtgcgctcgcgcgggcagaatgcaagccggcaaagcgatcgccgaccggccgcaagcgatcattgcttgccgcgtggctcgtccgcctcgtcgacgatcgaggggaggtaggattgaacctcggccctttccctttcaggcaagggtgcgatcttggtctgccaaaatcgctcggcttccggcgtatccttgtcccaggcgcgaaccgaggccttgttgtcgtcgaacgccgccagtcggcgcccgccaaggtggcgatattcatcggctgtctgcttggcgtgattttgcatgatcgtctcctattccagaacccgacggcaaagcgccctgaaccaggaacgccttgccacaggagaatctcgggtagggtttattcccgagacatgggcttaacggacgcccgggcctgttgttccgccagcgccgcgtccacggccgagaacggctccgcgaggttgcgacggtcgcactcggtttttgcccgtcactgccgtagatgtcgtcgtcggagtggattgcccgtccgcgaagtgtaaacggtggacgccgccggaaacgttcgcccggacctcgttgccttgaggcggaatgcccggaaggccgtgtcaggcgccggaggcgtcacacttgcacggatataatagtgtcgaccgagaccgttccctcgacgatacctctccgcaggccggcgcgtccgtgttcgatttcgatcacggtatagagcttgtcgtccctgaaggcgctggcattgactgtcgtgacgtcatcggccggcgcggcatcgacttccatgaagtccagttccttggaagcagcgacaatgcgcgcatctccggatgtccgcgcagccacgatcagcgtgccgtgaccgggcgcgttatcccagcgcgggtcgtcgggggcggccagaggttccagccgatagagatttaacatctcgcctgagccgatattgctggcgccggcctgggctgcatcgtccatctgagcttggctttccacggattttccaaatgtgttggatgtcgtggcattgttgacggcgttctcaccgttcctgacgacgttcgacatgacttgtggtcctcctgttcattcatgaagaacgaatggaggccgacgtcgttccgctaggagcgcggctttgccgctggtagaacgctgtaagcgaagcacggtcgtccgctctccggggggcgcgcttcagcgcgatgtctgttcagcgtgccgttctccccttagttcccacacatccaccttgctggcgcggcctttgagctgtacgggcccgagcgagcgaaagtcgaaatgatcggcggtcgtatccctcaccggcccgctgacgaggatggacgtatcgaactccttgttcagtccttcgagccgcgatgcgacgtttatcgtgtcacccatcgcggtgtattgctgacgagaagccgcgccgaagcttccgacgaccgccggtccggtatgcaatccaaagcgtgtgaacaggacaggacgcccgctctggcgattggtggcattcatcgcgtcaacggcggccttcatcgcgagcgcgcatcggcagccctgttgcacgtgctcgatggcttctaccggggcgttccacatgacgaaaatggaatcgcccagatattgaacgaccgttcctccatgctgttcggcgatattgttcagcagttcgaaatagtccgacagcgattccaccacttcctcgggtgtgtgctgttcggagatggccgtgaagtcgcggatatcgctgaacagcacggtgacatcttgtctcttcgccttggcgatcccctgtccgtccgggttgacgatccgccgaacgacctcgcgcggcacgtaaagcgcgaactggccgatggcatggcggctcgccgcaagggcggtcgccagcgtgttgatctcggtgatccaggaatgcgacatacccttttcacgaatatcgagatcgccgatcctgcgcgcctcctgtgccagctggtcgagagaacggctgaccatgcgcgacaggagcacagaagcaatcacgccggcgatgacaaagccggcggcgacaaggagattgcgcatcaatagttggtttgcgcgcgccaccagatccgaaagcggaacgacgattaccgcctcgcttcccgcaaagaggcccgaaacgctgatcggcgcgatctgcacgagatagcgttcgccttctagctccagtctcgccgagccgccggtggcgaaggcagggttccgccttaatgtgttgaccgcggcaaggctggtatcgaagttgcgatccgtcgcctggataccccccgtgtttcgcgaccacagctccaccagcttgctcatgacgtcggaatcggaatgggcaaccaggtaatccgcgccatctatgatataggcgcgggcgcggggtgaaatgtcatgtgcgtccaggaggctgctgatcgttctcaggtggatattgatgccgacaacgactttgccgttgccttgcattggcgcggcgatcgtcaacgtcggtgccttgagcgttcccgtgacataaggcccgaccgagactgccttgccgtcctgaaccaccgcccgataccatggccggtcccgcggatcgaaggacgtatctcttatggcacgctcctcgaccacgcctgtgcgggcgtcgagaaaacgcagcgttgatatcacatcgggccggtcccggcgtgcgatcgtgcggatcgcgaaggccgcctccttgggcgccgacaatacctgtcgcacctcctcgcgcacgatactgatcacctgcagataggagccgtcgggatatcccgcgtagacgcttgtcgcgtcgggaacgttgcgcaggatctccataaacagcttctctttgctctccatgtcctcgggaggcgtcgagacgagttgcggcatggttgaggccagcgcgacagcttcgtcggcttgccgcaaggtcgtgcggtacccgtcgatcaagcgcaggctcatctggcgcatctgttgcgcgccggctgtcacggcggcatcggtgccctgactgaaggccatccagatgatcggcattgacgtgcaaagcaaagacgccacgacgaggacgccgagatgcagcctcagcggccgcgaccagccgataacgttcctggagatgttaccgcctgccatcgcgcttctccccgccacgctgccttgtcgatatcatacgatgttgcggcagggaccggctacagagactgcggctcatcagcttgcgatgtggttgcaggccaataaggatcactgcggcttcaagtcgtagacctgattggagtccctgaggtcctggagggttttgccgacgcaattgccgccgccttcgccaccgacggccttggctcggccatccagcgagatcgtgccggcgatgcgatcggaggcgacgtaagtcgcgacgccggcgtccgtgaccctggagaggtagaaggcgtgcgtcgtatccttctgcttgcagtggatgatcatcgggaagctttcgaacgggtcgtcggcagcgtaagccgaccgttcgacgctaggatagagtggggcgacggaggcggcaatcatcgccaaggccggccagagccgtttggttgcacgccaggatgcgatatgtgtcatcgggacctcctgttgtcagcggttaacgtcgttcgcgatccgccgtggcgttgccgcgatccgtttaaagcgcgagcgcggcgagcgcgtccctgtccagcaattgcacgcatcgctgcagcttgcccttgaggcggatgatccgcctctctcgcagcttggtgaaggagcgcgccaccgtttcgatcgtgaggccaagatagtcggcgacatcgctgcggcacatcatcaggtcgaattcgctctcgtcgggatgacgctcggccatttcctggatgaagacggcgacacgcttcaaggcgctctgctcgatcatcgccatctgccgcgactgtgccttcgcaagattggcaagtgcgatgttgaggaggttgttcgtgaacgtgctgctgccggtggtcgcgaaggggcgtatccgtgcctcgcacacagcttcggcgaagtcggcgcgccgatcgccctgttcgaggccgaaccagtcgcccttcacgcaaaaggacaatatgtgcctgtgtccatccggcatcaaccgatagatccggatcgcgccggcttcgacctggtagaaggcgagcactttctggccctcgctgtagatcgtctgatcctgtttcagccggatcgtctggtcggcgcgggcggcaggttcgaaggcgcgcgggcgcgtgggaacttggatagactcctgtcgcagatcgtgaacgtgcaacatcgtatctccctccgttcccaggaagaataggcaagtcccgcgacgcggcacattcgaaattccccttacgtagtcctacggaagctctcttcgcgcgggcggtgtataacgcccaagccccacagaacgaccgggtctttccgcaggagggatcgatggcatcgagcgacggcgaagaccgcgacgccgaacagaaccgtgccgagatcatcgaacagctcgagcggatcttgagaagtcgcgagttccaggcgccggatcgggggcgtcgcttcctgcgccatattgtcgaggaggcgatcggcggtcgaagcgagtggttgaccgcctataatatcgcgcaggccgtttttggccggggccccgacttcgacgcgcagagcgatcccgtcgtgcggatcgaggccggccgcatccgccgcgcgctggagcgctattacctcgtcagcggaagtggcgatcccgttcacatcaccattcccaaaggacattacgcgccgcatttcgagcgaagagccggggtcggcggatcggcaaatgggcctgccgcccgctcgggcgagacgagcgcaacggcgcagccacggcggggcgaacgcaagctttcctatcgggatctgctggtgccggtcggtgttcccgccatcttcgcggtgctggccatgttggctcttatccgtccgctcgaggaatacctcacgccggcgcctagccggcctgccgcaaccgaggaccaggcgggcggtgcgcggatcgtcgtcgagccgctcgccaccctcggggctccatcgggcggtgtggaaatcgccagaggcctgaatgaccagatcatctcgcagctcacgaagcttgatggcgtcgtggtcctgacccccgccggctcatctccagcggcgacaacgggaaacgcggtgttcgcgttgcagggcaacgtcaccttcgaggacgacgcgcttcacgtgcagttgcggttgatccgtcgcgctgacggccgcgtgatctgggcgaagcggttcgaccacgacacgacgggtcaaaccgccttcgatctccaggatgcgatcgggacacgtgtcgtcaaggagatttcggcgatcagcgaaatcagggacgcgtcgcgaccgcgctagcgacctcgcatggcggaaggccgacgcctgtgggccgaccaatcatcagttttcacttcgggtggtcgatcctgaggttggcgacctcgttgccgacacccagcacccgcaagccgccaaaaaagcggtcctgatcttctgtgcgctggaggcgacgggagacttcctcgcggacgttcttcatcatctccggcgcgttggcgttcagccataccttcagctgaagggcttcctcggtcttgccctgcgctccgaggatggacatgaggaccaggcggtgcatcgggttgtactccaggtcagacatacgcgaccaaagctccgcggcctgcagatcaccgcgcatgaaagcgcaaagcgccatgccgacttcataatatcccttcggtcccgcatccttgttgacggcgcgagacaccaactcgcagccggattgccactttccagacatggcgagccgcaacccgtattcgccggcaacctcggtatcgttggcgttggcggcgtaggcggcggcgccgagtttcagcgccctgtcgatatcgtttgtgaagaagctgaccagcatttgcgcctgcagagcgcgggtgttgttcggatcgatcgccgtcgcgcgctccgccgcctccgtcgcccgcgtcatggcatcgggagagggctgcgagccgaacttgtagcgaaaccggatttcatcgagatagacgagggagagcagcgcccatgacgaggcgttggtcgggaagcgatcggtcgcgcgaagaagacagtcacgggcaacggcatggctttgcgtatccattccgcggcggtagctgtagtaggccattgtgcagtcgtatgccccgctcagttcggtcatcgacggctccgcgattttgttggtgccagccgtgaaaatcgcgccatagggtcgagccaccgcgacggcaatatcctgtccgatgtcggcttggatctgcagtatgctcttggcctcaagatcggcgtcgtaattgttcgcccagattacggcggcgtcagaccgccggatcaaccgggagatggatcgcagcttgttgccgtcgcgttgcacgctgccctgcagggcaaagccgctcgcgttcccatcattgctccgagatggatcggcgacgacgacgatgtcgtcgaacgtcgcgagctgaccgatgacctcgtctctcaacccctgcgcgatgtcgacggtcgacccttcggccccatccgattgaaactcgtccacgatgatcatcgggctcgacgtatcggcgagcggggattgccgcatgccgatgctgctcttcaaggagcccgcgggcaacaggagatagccggctgcaagcgcgatcatgaacacggcgccggccgccagcatggagataaaccgtgtgtcccgcgtcttgcgatcgaccggcaggtgcaaggtctcgcgctccgaccgaggctcggcatcggcggctgcgccggttggctcggcatgatcgaaatgaggaacgtacccccccttcgggatcgtgatcacgatcggatcggcctgcccggcaaccagataataacgctcgaggccacggcgaatccggccggcttcgatcctgacgaccgggtcgttctgcgcgtcgaacgaactctgcctaccgaagatttcgttggcgatcgtgaaggccttgaggaactgggcacgtccctccagcgtctcggtgaccacgaagcgaaggaatttcctgccacgctccggcgagtgaaactcgtcgctggcgagaacacgctcgagttgttggagaatgtcttcgggattaggtctcggttcgcccgaaaactcgacctttgcgttgctcatgatgcccctccgacacgaccacgcaattctattcagtccctgctaattgagcatagcttataaccatgagtggtttcaatggctttgttgaacgcagcctagagtaggcggactggaacggctggcagggcctgactgcgtgccgcaacgggctgcggcataccgcccgaggtcaacaccattcgcagcaattccgcaaggttgcgcgcttccatcttcgccatgacattggcgcgatgaacctcgaccgtgcgggcgctgatgccgagattgaaggcgatcatcttgttctgcaggccatcaagaacggcggcaagaacctggtgttcccgatcggtcaactgccgcagccgattggcgaccatctcggtatcgacaggcactggcgatggaggtgttcggcgtaacgcggcctggttgatcgccgcgatgagcgtctggtcctcgaacggcttcttgatgaaatcggcggccccggccttcatcgcctgcacggccgtttccacgtccccgtcgccaccgacaaggatcgtgggaatgttcgcgttgagcgcattcagccgctccagtagctgcaatccatcgacgcaggacatccgcgtgactttgacgaggcaggccctgccggataggggcagctgatccagaaacgccgaggcgctttcataggcgcggaccgcgaagccggaggatatcagcaggaacgtcaacgatcgccgcggtatctcctggtcatcgacaaggtgcacggtcaggtcattcgccatcgagtaagctctccctcaaatgcaacgaaagcgcgagagcgcggttccccaaatccaccctctatctaactgtatattaccacgtcgctgccctgtgcaggcgtagcatcgcgtaaactctatggtagcttgagcgttgaaaacattgctcttgggtgcatcggctcgacctcgagcgccggaatgcgttgatcccgctcaatgcctggtggccacgcatggcctatgatctcggaactttccccaagttctcgacggagcccctacgatgagaaagctggcccttgcgacaggaattgcgatcgccgccgtcatggcggcccctgtcggtgcgcaacaggatcgcaaggaataccggcgcatgaactgggccgaaaatctgcccggtgcggtcaaggcctaccacggcaaacggttctcggtggtcagctatcgcacggcgatcgagactggcgcgctgcctcagccgggtacggcggatgaggtaaaggcggttcaggccgcggcacggtccaacaagtggctggtcgaacagctgaaggcgaagaaactgactcccaacgatatcgaatgggtcacgcgggcgcgcaacggcaatctcgtcttctatgtggaatgatccgggcttgcgggtggcggcggtcccggcggctggctccgccgggaccgccattcccgacgtcgcgcatgtttgtcgccgacacggaatagcgcgcggcggattgcttgcgatcaatgacacggtcgaacccgtcccgttaggctcatgccatccgtgggtagcagggcgatcgctatcccaagcagcttggaggagagcttgatgcgtggttttggggttcattcggaagtcggcaagctcagaacggtgatggtctgccggccgtcgctggctcaccagcgtctgacgccgggcaattgccatgatcttcttttcgatgacgtgctctgggttcatgaggcgcagaaggatcactacgacttcgtgctgaagatgcaggagcgcggcgtcgaggtgctcgaactgcacgacatgctggcgcagaccctggtcgacaagccggcgcgcgacttcgtgctggatcgacgcattacgccgaatgtgctgggttcgcagatcgccgaggcggtgcggccctggctcgacgagatgccgtcgacacagctcgccgcctacatgatcggcggcatcgccatttccgacctgcccgacgtgaaggccaaggcgctgatgctgagcgcgctgtccgagaccgaattcgtcattccgccgatcccgaacacgctcttccagcgcgatccctcgtgctggatctacaacggcgtcacctgcaatccgatgttctggcctgcgcggcagccagagacgctgatccagcgcgcggtctacaagtttcacccgctgttccgcgacggcgatttcaagatctggtggggcgatagcgacgaggatttcgccaacgcctcaatcgagggcggcgacgtcatgccgatcggcaacggcaccgtgctgatcggcatgggcgagcgcaccacctaccaggcggtcggccaggtcgcgcgctccttgttcaagaacaaggccgtcaccagggtcatcggttgcctgatgccgaagagccgcgcggccatgcacctcgacacggtcttcagcttctgcgaccgcgatgtcgtgacgctctttgccgaagtcgtcgatcagatccgctgctacagcatggtgcagacggatgacgacggcaatttcgacattcgtcccgagacggagccgatgctcgatatcgtcgccaaggcgctcggtgtcggcaagctcagggtcgtggaaacaggcggaaacgcctaccaggccgagcgcgagcaatgggatgacggcaacaacgtcgtcgccttggagcctggcgtggtggtcggttatgaccgcaacacctacacaaacacgctgctgcgcaaggcgggcatcgaggtcatcaccgttcgcggttccgaactcggccgcggtcgcggcggcgggcactgcatgacatgcccgatctggcgcgaccccgcctattgacatcagacatcctgaaacagccctacggagcaagaccatgagcttcaatctgcgcaaccgttcgcttctgaccgtgcaggattatacgccgcgtgaattccgttatcttctcgatctcgcgcgcgacctgaagcgggccaaatacgctcgcaccgagcagcagcacctgaagggcaaggagatctgcctgatcttcgaaaagacctcgacgcgcacgcgatgcgccttcgaggtcgcctgctcggaccagggggcgaacgtcacctatctcgatccgtccggctcgcagatcggccacaaggaatccttcaaggacacggcgcgcgtgctcggccgcatgtatgatgcgatcgaatatcgcggttcggcgcagcacggggtggagacgctggcccgctatgccggcgtgcccgtctataatggcctgaccgacgagtatcatccgacgcagatgatcgccgacgtcatgaccatgcgcgagcatgccgacaagccgatcgccgatatcaaatacgcctatatcggtgacacacgctcgaacatggggcattcgctgctgatcgtcggctgcctgatgggcatggatgtccggatttgcgggccgaaatcgctatggccggccgaggaatacatcaagatcgcgagggaattgcaggagcgatccggcgcgcggctgttgatcaccgacgatccgaaggaggcggtgaagggcgtcgatttcatccacaccgacgtttgggtgtcgatgggcgagccgaaagacgtctggcgcgagcgcatcaagctgttgacgccctatcaggtgaacgaagagttgatgaaggcgagcggcaatccgcagaccaagttcatgcactgcctgccggccttccacgacacggagacgacattgggcaagcagatcgccgaggattacggcatgagcaatggccttgaggtgactggcgaggtgttcgaatccgaggccaatgtggccttcgagcaggcggaaaaccggctgcacacgatcaaggcgctgcttgtcgccgacattgggagactaggatgcggatcgtcatcgcgcttggcggcaacgctcttctccggcgcggggaagcgatgaccgcggaggtccagagacgcaatacgcgggtagcggccgaggcgatcgcgccgctggccgccgagcatcagctgattataacccacggcaacggtccgcaggtcggcttgcttgcgctgcagggcgccgcctacaagccggatgaggcctatccgctcgacgtgctcggcgccgagaccgaagggatgatcggctacatgctggagcaggagctcggcaacgtgctgcccttcgagcagccgctggcgacattgctcaccatggtcgaggtcgatgccgacgatcctggtttcacgaaccccaccaagttcgtcggcccggtctacgagaaggcggatgccgatcgcatccgctcggagaagaactgggtgttcaagcaggatggcgacaagtggcgccgcgtcgttgcctcgccgcttcccaagcgcatcttcgagatccgcccggtgcgctggctgctcgatcagcgcaccatcgtcatctgcgccggcggcggcggcataccgaccatgtacgagaagggcaaggaacgtcacctggttggcgtcgaggccgtcatcgacaaggacctttgctcggaactcctggcgcgcgagatcggcgccgatctcctgatcatggcgaccgacgcgccagccgtctgcctcgactggggcaagccgtcgcaaaaggccattcacaaggcccgccccggtgacatgaaagagttcgattttccggcggggtccatggggccgaaggtcgatgccgcatgtcatttcgccgagacgacgggcaaggctgcggcgatcggatcgctcgcggatatcgccgggatggtgcggggcgatttgggcacgatcatcgatggccgcttcggtgggcttagctggcacgggtgagcaggctgaccggaagaggcaaaggttagagagaagcagcggggcgtatcggcgccccgctttgcgtttcgacgctttccagccgcgcgatatcaccgtttcgccgttgccagacatagacgggaatgccgagcatcagaagcaccatgccgtagagcaccggctcggcgcctgagccatagagcgtgaacatggcgaagaggaaggcgatcaattcgatgatggtgacgcggggcgttttctgcccgttgctcagccgcgaggcgacaagggtgccggcaagcgcgcagaaggcgtaggggacgacggccgtcatcgtgctcaaccccaccatcagccggtagaccgccgcgaaactgtccgatccgactgcctggacgaggacgagcagggtcgcgaaggtggcggagacgaccatgccgatcgccggcacgccgcgcgtggagaggcgggcgaagagcggcggaaacagcccgtcgcgggcggcggccatcggcacctgacccatcagcagcgtccagccattgagcgcgccgatcgaggagatcaccaccgcaatcgagattgccagttcgccgcctcgcccccacatcaaccccgccgcttgagagaagggcgcgacggaattgacaagctgcgcgcgcggcacgacgcccatcacgacgacggtgccgaggacataaagagccgcggcgatggagataccgagcacggtcgaacgggggattgtccggcgcgcgtcccggacatcgccagcgggaacagtggccgattccagacccagataggcaaacatggtcagcggcgccaaggccgcgaaggattgcagcagcgattggccgctcgggttgaattcggcgaaatgagaggtgtcgatgtaaagaaggccgatgatggcgacggcgccgaaggggatgagcttggcataggtcgtcacctgcgcgaagagcccggccgcgtggacgccgcgcaggttgacgagaacgatagcccagatgacgccgagcgtcaggatcgttgcggtgagccggttgccgaagacagggaagagatcgaccatcacgccggtgaaggcgatggcgatgaccggcagcgacgaccagatcgatatccagtaaccccaggcgatgagaaagccggcgaaatcaccataggcaagccgcgtataggcgtaaggaccgccgacggccggcaccatgccggcaagtcgcgcgaaggtcagcccaaggcagatcgcgccggcacccatgatcatccacaccaggatcgccagattgccgtagggcgccaccgcggccggcgaaagatagaagccggacccgaccatattgccgacgacgatcgcggtacaggcggcaagcccgaggcttttcccgttctgcgaggttgtcatgaaatccctcccgaagatcggtttccgctgtgggcgatagccgtgagacgttggccgtgacacgcgttggatggtctcccttgtcgtgtggccactcgcatcctcttcccaatccactggcctcgcaatccggatcaatgcgtagtccgcgacccctcgtcacgccttcaccaatcgcttgaacgcgctagaatgcgatggggagctcaagcggagacgacgatgcggaacgagcagcgctttttgaccatatcgatcgcagcaacggtggtggtggcagccctcggcatcgtcttcggcattgtctcgggctcgttttcgatcgccttcgacggcgtttattcgctggcggatgccgcgatgaccgggcttgcgctctgggtatccagcctgatcgtgcggtcggcgcagaatagtgagaaggctcgccgcattcgcaatcgcttcaccatgggattctggcatctggaacccatcgttctgctgctcaatggctgcctgctggtcacggtcgccgtctatgcgctgatcaacgccgtcatcagcatcatcaacggcgggcacgagctgtttttcggcgccgcgatcgtctattccggcgccacgcttgtcgtctgcgtggtgatggcatcgatcggcatcgcgttgaaccgcagcctgaaatccgatttcatcgcgctcgacatcaaggcctggatcatgtcgggcggtatcgccttcgcactcctcgtcgccttcgtgatcggtctcgcggtgctgccgacgccaatggcctggatcgcccgctacgtcgatcccgtggtactcggcctcgtatgcctggtgatgatcccactgccgatcggcacgatctggaaggcactgagcgaggtgctgctgatcgcgccagtcgacctgcaggaacatgtcgaccaggtggcggctgagaccgtcgaacgccttggcttcctctcgtaccgcgcctatgtcgcccgcgtcggaagggcgacggaggtcgagctctacttcatcgttccgcagggactacccgccaagacgatcgaggaatgggacgcgttgcgcgacgacatcggagagcggatcggcggcgagagcgccaatcgctggctgacgatcgcctttaccgccgatgccgaatgggccgagtaggcgtcttttcgcctcgccgtctgcttttgccctcacgttgactgcaatcaacgacggtcctcaacctgccgtgtaccatccgcccaattcgagacgcatggggctgcatgacagccgttgtccaaacttgggttctggaggggcgcatggaattccacaagtcatttccgatcgccgtcatcgacgaggatttcgacggcaagagtgccgccggccgcgggatgcgcgctttggcggccgccatcgaggcggaggggtttcgtgtcgtctccggcgtgacttatgaggatgcgcggcgtctggtgcatatcttcaacacggagtcggcctggctggtttccgtcgatggcacggaggacaaggcgtcgcgctggcaggtgctggaggaggtcctgagcgccaagcgccgcaagaacgaccggctgccgatcttcctgttcggcgacgacaccacggccgaggacgtgccggccagcgtgctgcgccacgccaacgccttcctgcggcttttcgaggattccgccgagttcatggcccgtgccatcgtgcaggcggcgcgtaattatctcgaccggcttccgccgccgatgttcaaggcgctgatggattatacgctggagggggcgtattcctggcatacgcctggccacggcggcggtgtcgccttccgcaagagcccggtcgggcagctcttctacaccttcttcggcgagaacacgttgcggtcggatatctcggtgtcggtcggcagcgtcgggtcgcttttggatcacgtcgggccgatcgcggagggggagcgcaacgcggcgcgcatcttcggcacggatgagaccctgttcgtcgtcggcggcacctcgaccgccaacaagatcatctggcacggcatggtggggcgcggcgatctcgcgctttgcgatcgcaactgccacaagtcgatcctgcattcgctgatcatgaccggcgcgacgccgatctatctcattccgtcgcgcaacgggctcggcatcatcgggccgatatccaaggatcagttcacgcccgaggcgatcgcccaaaagatcgcggccagccccttcgcgggggaaacgagcggcaaggtccggctgatggtgatcaccaactcgacctatgacggcctctgctacaatgtcgatgccatcaaggcgtcgcttagggattcagtcgaggtgctgcacttcgacgaggcctggtatgcctatgccaacttccacgagttctacgacggtttccacggcatctcgtcgacgcagccggcgcgctcgcagaacgccatcaccttcgccacgcattcgacgcacaagcttctcgccgccttctcgcaggcgtcgatgatccacatccagcacgccgaaaacaagaagctcgacgtcacgcgcttcaacgaagccttcatgatgcacacctcgacctcgccgcaatacggcatcatcgcgtcctgcgatgtcgccgcggcgatgatggagcagccggccggccgcgcgctggtgcaggagacgattgacgaggccatcagcttccgccgggcgatgaacgcggtgtgcgggcagatggggcacagctggtggttcgacgtgtgggagcctacgatcgccgaggagacgccgagcgatacgcatgcggagtgggtgctgaagcccggcgacgcctggcatggctttacggggcttgccgaaaaccatgtgatggtcgatccgatcaaggtcaccatcctgtcgcccgggctttcggcggatgggacgatgcaggagcacgggataccggcagccgtcatcaccaagttcctctcctcccgacggatcgagatcgagaagaccgggctctattccttcctcgtgctgttctcgatggggatcacgcgcggcaagtggagcacgctcgttaccgagctcatcaacttcaaggatctctacgacagcaacgcgcccttgacgcgggcgctgccggcactagccgccgctcatcccgaggcctatggaagcatgggcctgcgcgatctctgcgagcagatccacgccatctaccgcaaggacgatgtgccgaacgcgcagcgcgagatgtatacggtgttgcccgagatggcgctgcggccggccgacgcctatgaccatctcgtcaaggggcggatcgagagcgtcgagatcgacaagctgatgaaccgcatcctggcggtgatgatcgttccctatccgccgggtattccgctgatcatgcccggcgagcggatcaccgaaacgacgaaatccattcaggattacctgctttacgcgcgcgatttcgatcgtaagttcccgggcttcgagaccgatattcacggcctgcgcttcgaggccggcagcaacgggcgacgctatctggtcgattgcgtggcggatggagcggtccaatgatcccgcgcgacgtgaaatccccgacggttgcgataccgttcaacaagatgctgaagatcgtcgccgtcgtcgatcgcgataaccgccaggtgcaggaactgctggcgcagctcgcggcagacaatttcgaggtcgaactccgcgatgattacacggccgacgtttcggaagacgcctcggtgggcgcctatatcggctccgtggaaggcggcctgcttccctatgcgcgcggctttctccgctcgttgcgcgaggcgggtttccgcacgccggtctgggcgatggcggatacgctcagcattgccgacatggatgtcgtcgagatggcgggcgaggtggatggcttcgtctatctcggccagcagacgccggccttctacgccaagcagatcgtctccagcctgatcaattacgggaagtcactgctgccgccgttcttcgggggcatgatggcctatgacggagaggccaatatcgccttcgattgccccggccatcagggcgggcagttctatcgaaagtctccggccggccagctgttcttcaagtatttcggcgagagcatcttccgcaacgatctgtgcaacgccgatgtcgatctcggcgatctcctgatccacgaaggccccgccgtcgaggcgcagaagcaggcggcgcggattttcggggcggatcgcacctatttcatcctgaacgggaccagcacctccaacaaggtggtgaccaacgcggtgctgcgcgccggcgatctcgtgctcttcgatcgcaacaatcacaagtcgctgcatcagggcgcgctggtgcaggcgggtgcgatcccgatctatctgccgacggcgcgcaactccttcggcatgatcggcgccgtcgattgggcggcatgggacgagggctggctgcgccagcagatcgcggcccatccgcttctcgcggacaagagtcgggccaatgccgagcgtcccttccggctcgcctgcatccagctcgccacctatgacggcacgatctacaatgtccgccaggtcatggagaagatcggtcacctctgcgactacgtcctctgggacgaggcctggataggctataacgcattccatccgctgttcgagggccatagcccgatgcggctcaaggacctcaagcccgacatgcccggcctgttttcgacgcagtcggtgcacaagcagggcgcaggcttctcgcaggcgtcgcagatccacaagcgcgacgaacatatcagcgaccagcgccgtttcatcgagcacaagcgcttcaatgaatcgctgctgatgcacgtctcgacatcgcccttctacccgctgtttgcgtcgctcgacgtcaatgcgaaggtgcatgagggcaaggccggagagatgctctgggaccgctgtatcggtctcggcatcgaggttcgcaagaagctgcgcggcttcgtccagcactatgagagcaaggcgacaagcgccgaggaacagtggttcttcgatcccttcgtgccggacaagatctccgtcacggggtccaaacataccggcgatctcgctgggatcagatgggaagacgtgccgaccgatgtcttaaagcgcgagcagcagtgctggcggttcgaccccgaggcgacatggcacggctatgccggctatgcgcccggttacacgatggtcgatcccaacaagctgacactgctgacgcctggtatcgaccggaagacgggtgagtatcgcgatttcggcatcccggcgaccgtcgttgctaactatctgcgcgagcagcgtgtcgtgccggagaagtgcgatctcaacagcctgctcttcctgctgacgccggccgaagacgagagcaagctcaacacgctggtcgccaagctggtgaagttcaagaacctgtgggatcgcgacgcgccgctgcaggatgtgttgccgacggtcttcgccgccaatcgcgagcgttatcagggttataccgtgcggcaggtctgcaaggagatgcacagcttctaccgctccgccggcgtcaaggagctgcagcgcctgtgcttccgctccgagagctttccggaaccggcgatctcgtcgaagcaggcttacgaggcgctggttgccaacaatgtcgactacgtgccgctgtcggaagccgccgggcgcatctcggcgacgctggcgctgatctatccgcccggcatcggcgtgatcgtgcccggagagcgctgggacaacagggcgcgaccgatgcgcgattatttcctggccttcgaggagtccttcaaccgcttcccgggcttcaactacgaggtccagggcgtgttccaggaacggatcgatgggcgcatcaagttccatacatatgtcgtgcgcgagtagggcgaggggagagtgccatcatgaccgatcacacaatgcatgctgcggccgataccacggccaagaaaaagatgaacctgatgcagctgaccttcatcgttgccgtcaacatgatggggtcggggatcatcatgcttccggcgaacatggcgcaggtcggcgccatctcgctgctctcctggatcgtcacggcgctcggctcgatggcgatcgcctacggtttcgcgcaggccgggctgttcaatcagcggcccggcggcatgtcggcctatgccgaggatgcctacggcaaggacggctatttcctcgtcttcttcctgtatttcctgtcattggcgatcggtaacgtcgcgatcggcatctcggcggtggggtatctcgccggcttcttcccggtgttgacctccacaccggtcatgacctgcgtcgcgctgatcgccctcctgtggctgaccacggcggccaatttcggcggcccgcgcatcaccgggcggatcgggtcgatcaccgtatggggcgtcatcatccccgtcggtctgctctcgatcatcggctggttctggttcagctcgagcacgtttgacgctgcctggaacccgaaggggttgacgctggcgcagggcatgggatcgagcatctcgctgacgctgtgggcgttcctcggcatggagtccgcggcgcagaactcagatgctgtcgaaaatcccaagcgcgacgtgccgcttgcctgcatgttcggcacgctcggcgctgccgtcatctacatcctgtcgacgactgtgatccagggcatcgtgccgaatgccgatctcgcggcgtcgaccggtcctttcgcgcttgcctatgcgaccatgttcaatccgacgatcggctcgatcatcatggcgctcgcggtgcttgcctgcgtcgggtcgctgctcggctggcagttcaccatcgcgcagacggcgcgcacggcggcccaggagcggatgttcccggcgatcttctcgcgcgtgaaccagatgggcgcgccggtgcagggcatgatcatcctcggcatcgtgcagaccggccttgccctgatgacaatctcgccgacgctcaacgagcagttctcggccctcgtgaacctcgccgtggtgaccaacgtgctgccttacatcgtggcgctttcggcgctcttcgtgatgatgaagaaggcgggcgtgccgccgggcaagtaccggttgaactccatcatcgccacgctcggcatgctctacagcgtgttcgcgatctatgcctcgggcaaggacgcggtgcttggcggcatgctggtcacgggcatcagtttcatcatttacggccggattgcgccgcgctttgccactgggctgaaccgtgtcgcggcggccgaatagttccggggaggatgtgtcatgcaacagaaaagtcgtttgaagacattgctgactgcgtcgatcctcgccggcgcgaccgcctccacggtgctatcgccggccgaggcgcagacgctcgatcgcatcaagacaagcggtgcgctgaagctgggctatgagccggatgcgcggccattctcgttcaagaccgagcaggctgagcccggcggctatgcggtcgcgctttgcggcaagatcgccgacagcctgaagacggcgctgaacctgccgcagctaaatgtcgagtgggtgccgctgacggataaggggcgggagccggcgataaaggatgggacggtggatctcgtctgcggtgccgcgccgatcacgcttgcacgtcgcgccgaggtgtccttctcgctgccgatctttccaagcggcaccggagtggtcctgagcaagagcgcgccattggcgctgacggaggtgctggcctacgggcagcccagcagccggccgatctggcgcggctctccggcccgaaccgtgctcgagcacaagaccttctcgtcgattgcgggaacgaccagcgagggctggctggctgaacggatcaagaccttccagctggcggccacatcggtgcccgtcgagagctacacgatcggaatcgagcgcgtcgtcgacggcagctcggccgcgctgttcggcgacatgccgcttctcatggacgcggtcgcgcgtagcgacaatgcggataacctcgtggtgctcaggcggcacttcacctacgagccgctggggctcgaactggcgcgtggtgacgaagacttccggctcgccgttgatcgcgctctcagccagacttatgcctcggccgatttcgcgggacttttcacgacatggttcggtgtgcccgacgaggcgatcgtcaccttcttccggcagaccgcgttgcctgaataagcacacggttacggcgccggcagctctgctcgccggcgtgcacggccgtcgtggcagacgcctgcatttcgcgagccgcggcacttctttcttgaaatgcttagtcgggcaccgatcggagcccgcgtcgtcacgctttttccgttgataaatatcatatttgctgcatcgcggaacaatccgaccctcgagcgaattcgtacaaggagtgatgtgaatgcggaggtaatccatgaaccgggagcgcggaaggaggaggctgatgctcagactgccggacatccggcatgtcctgtcgggcgtgccgacggaagcgctcggtgacatgttcgagtcctacgccttggccgccgatgcattggaccggtttcgcagtgaaagaccgctacaggagagcctgatagccgaatatgcgcagttgtgccatgagatagagcaggaggtgatcctctattgctccggcgggttgcgatctcgcggctgacgaccttcatctttcttgcttttatagttcagctagccaggggcttgctgaagcggcgtcgcttcggtgctttcgcgcgggggccacgcccaggcgcgcagcagttcgtagaacacgctgagcacgatcggcccgagaaacaggccgagcagcccataagataatgttccgccgatcaccccgatcaggatcaccagcatcggcgtcgagaggcctttcgccatcagaatcggcttcaggacattgtcgaccagcatgatgggcaccgccacgacggtaagcgcgaaggcgaccgaggtcggccatgagaaccaaccccagatgaccgcgggcacgaggacgagcccgggaccgagctgcatcacgcataggatgaagatgatgaaggtcagcgctccgcgcgccggcaggtcgaagaaggcgaaacacaggccgcacatcagcgtctgcaggaaagcaacgccgatcaccccgcgcgagacattcctgactgtcgttcccgccagcttcgcgaagccgacgccccgctcgccggcaacgcggctcgcgagaacccggatcgcctcggcaaggcgcgtcgactgggtgaggaagaagccggagaggatgacggagacgacgaagctcaaaacgccgccgctgatcgaagccagcttcgccaccacgatgcccatcacgttcaggatcggcttttgaaactctatgatgttggaagccagatcgccggccaccttgttccatgcggcgtaggcgcgttcgccgataacaggccatgcgcgaatgctttcaggcgcgaccggtagtgcgaagctctgcgtctggagtttgccaaccagcccttccaccgcgtccgcgaaattgacggcaacaagcgccagcggcgcgatgatgaggacaaggcaggcgaggacgatggctgtcgcggcaatcaccggtcggtttccgatcagccgcgacagcgcgttgaacatcgggtacagcgcgacggcaaggatggccgaccagacgacgatcagcgcgaacggcgcgatgagaagcatcgtccaataggcgaacagcccgatgatcccaagtcgcacgaggtcgctgaccctcgcctcgatcgagatctgtccggcgtctttcgctccaatgcccacatcgttcgtctggtccatcgtcatatcccgcgcaacgcgttccagtgcgaacccgacatcactgcgtcatgtcgggcacgacgtggcggacgctgccgtcctcgacgaagtccgacggccgcttctggcgctttccaaggtctggctcctcgaatttgatgcgctcgtaggggatggattgcaggatgtgcgagatgcagttgatccgggcacgcttcttgtcgtccgagggaacgatccaccatggggcgtgattgctgtcggtcatcctgagcatctcgtcataggcgcgggtataatcccaccagcgctgataggactcgacgtccatcgggctgagcttccactgcctgaccggatcgtcgatgcggcgccggaagcgacgctcctgctcctcctcgctgacagtcaggaagtatttgagcagcgtcacgccgctttcgacgattgccgcctcgaaacgcggcgcgagctcgaggaaccgctgcaccttcttctcgctgctgaaccccatgactcggtcgacgccggcgcggttgtaccagctgcggtcgaagatcacgacttcgccggccgccggcaggtggttgatgtagcgctgcatgtagatctgcgatttctcgcgttcggtcggcgcgggcagcgcgatcacgcggaagacccgcgggctcaccttctcggtgatccgcttgatcatgccgcccttgccggcggcgtctcgaccttcgaagacgataaccaccctggcgcccgatttcttgacccatgcctggagatgcgccagctccacctgcaggcgggcgatctgcttgtcgtaatcccacgacttctttttcttcttgtccttgccgttggattttgctgatggctccgggtcgtgacccttggtttccagtatctcgtccatggttctccctccgtgcttttaaaccgtacggcctgccgacgccgtgcctgtcttgtcgtagtttccgaccagcgcccgcagcgcttcttccctgccgttgaagatgttttccgggccgatcgtcctgatcacgtcggcgcggctcagaatgccgcggctctcctcgctgagatcggcgatcgagaaggtgatgttgcgcttgtcaaggatgtcggccacggcctcgagcgccgtggcgccggtgctgtcgatatgggtgatcgcgctggcatcgagcaccaggcatcgggtctctggggcaaggtttcgcgccaccgaggtcaggcggtttctgatgtagtcggcgttgtagaagaggatgctgccctgcaccgcgaagacggccgcgccatcgaccgggcgtgcctcggggtagcgggcaaggtcgaagaagccgtgccggccttcgatgcggccgagcaggccatcgcgcggaaacatcgtctggcggagcagatagaccagcgtcgcagcgaccgcgacgatgacgccattgagcacgccgaaactgatggcgccccacatggcgatcagcgcgaagatgaattccatgcggctgatgcgccagatcttgctcagttcgtgaacgtcgatgaggctgattgccgccatggcgaggattgcggccagcgccgggatgggaaggatgcggagcgcgctgtggaggaagacgagggccgcgatcagcgttgcggccgacaccaagcccgcagcctgcgagacgccgccggtcgacaggttgattgccgtgcgggaatccgagacgctgatcgggaacgagccgaaaaggccgggcgcgatgttcgccgcgccgaggccgatcagttcctggttcgcatcgacctcttcgccggtgcgcgagccgaagctgcgggccgctacgatgcccgcgccgaagcttaccagaaagatcgcggcggagccgagtatgatcttgtcgagcggcatctgatggagcgggggcagcgagaagttcggcaggccgctcgggatgtccccgacgacggagatgccgcgcccttggaaatcgaagacggccgagagcaccaccgagaggacgacgaccaggaccggccctggaatcttgagctggaaggctcggaccagccaaagcagcgcgaacatgaacaagccgagaaggagcgagggccagtggatcagtccgcttttgcctgcgatttcgaccagcggcgggacgagcccgtcggactcgattttcacgccggtaaagcggccgatctggccgacgaggatagacagcgacacgccggcgaaaaagccgacgaggatggggcgcgacaggaagcttgcgagaacgccgagacgtagcagcttggcggcgatgcagcataagccgacaccaagcgcaagcgccgccgcgatgccgacccgatcgaccggcgtaccggcagggtaggcggcgacgatcgttcccatcgccgccgcaagcacggtcatggtggcggcatccgggccgacgacgagtagtcgcgagggtccgaaaatcgcgtaggcgatcggcgcgacgatgctggcgtagatgcccgtctccggcggcaggccggcaatggcaggataggcgatcgcgctcggcaggccgaccgccgcgatcgacagcccggctggaatgtcacggcgcagccagtctcgattgaaaccggccaagccgcgcaacatcggaatgctgcctatcaccgttcgctcctcttgctctccgcgttctcccgacatcgcctcccttgcgggcggtcagtgctcgaggaacacgtagttcatccagctgttcatgcgcagaagcactttccggagaatggcgacctggcgccagtatttcgaatagacggcgacctcggcgaccacaccgccgggcagctgatagccctcggtgctttccagcaactggatctgcgccagcgtctgccccggcgacaggcgctccggcgattgcgggtctatcaacgctccgctcggctgcagctggccctgtgccatcacgtcgataatgccttgcaccttggccttgaagatcttgccagggacggccttgaacgacacctcggcttcatcgccgacgcgtacgcgttgcagcgagttctgaatgaaggccgcgccgagcatctggtcgtcgctgttgatgaagaccatcaccggtcgcagcggcaatgggtttgccatcatgcccgggcgaaggaagacctgcgtgacgtagccggcgctcggcgcacgcacgaccgtttgttcgagatcgtattcggcattcctgagttcggcctggaggcgtgcgacggtcgggttcgtgccgttgatctccgattcataggcgagctttgcctgggtggcttgcgcgcgcgccgtgtctaccgctgcttccgaggtcaggtagagaccgcgccggttttcgacttcgagttcggaatagacggctcccctgccgctcgacttggagttctcattcgattgctgaaacttctcgaatgcctgcaacgagcgatcgcgcgaggcttcggcgccggtgacggcggcgttcgccgcatcaagtgccgccttcaattgcagcaccgtctgctcggcttcggcaagcgccgcctttttctggtcgaccgtgaactggtagggtcgagggtcgatgcggaagagaacgtcacccttcttgagcggcgcgttcgggatcaccgggacctcgacgacctgtccgccgacaaccggaatgaccggggccgacgtgaaatagacgcgcgcttcgctggtataggggtggttgtagctcatcagcagcaacagggtcgcgatcaggaatatcccgccgagaaccgctgttcccagcgtccactggttcaccgggatgcggaatatcttgaagatggcgtagcagatcgccgcgtagatcaatatgagaagcaggtccatcaggcgttctccttctccggcgcttggccttcaagttcggcgatgcgcgcatgcagtcgcgcgatttcagcgttggcttcctgcgccggcgacagcttgccgtccgtgcgcatgccccagccgcgatcctcgcggtagatcgtcgcccagatgaacaggaacggccagatgacgtggagggtgaacaggctcacccatcccgcgatgtggatcgcatcctgatgcggatggtttctggcctttgcgatcaggtgcgggatgtcgtggatcgcgatcaccgcgtagaacagtgtgatcacgacgaaaaacagaacgcccagtgcgaaatagtcgaggaacacggtctttgcctttcgacagcgaatggtcgaaccttgcgggtgtgatgaatacgcaaaaacaatagacctgcgccgacggcgacgcccgtagcatcacgtaacatctatcggatcagcggctgtcgattggctgcgcgcgccatgaaggcgcgtcgccgatcgacggtctcaagccgagagacggcgccgccatgcccggtgcagccgccatggatcgccattcacccggatcggaggcgccgcgtatcttcgcgtatcttacgtctgcggccatccgaaccgccctataatcagctcgtcttccgggggggggatcggcggtggggggtgcgatgagctggagagaaagcaatacgccgcgactgtccgctctcgccgtcgccgaggtccatttccccgatcaggccagcagggtccggcatttataccaggtcagcgacgcgtttcgcagcatgtgcgacgacctcgcggtgatcctggagacgctgacgcatctcgatgatctgccacgcgccgagcgggaggcgcgcaggcaggaatacaaggaactggagaaagcgcttctcagcgagatcggcgaggcgctgtcccaatcgaacgtcgtatcactcaagcgctcctgagcgctcggacacggatcgtgtcgcgcagcagcattcatcgccatttgcacggaaaggtcgatgcgtcatgaaagcaagatcgttcaaactagccaacagcctgaccaccggactggcggcgctggctcttgtcatgcagccggcgccgttcgtgttcgcgcaaacggcggctcccgctgccgcgccggccccaacggcaccggcggctgccgcgaccgcgccggatcttctgtccgaggacgagctggaaatcctggtcgcccgcatcgcgctctatcccgacgagctggtcgccgcgatttcggccgcgtcgctctttccgctgcagatcatcgaggcgcaacgcttccttgaagcgaagaagaagaacgccgatctcaaacccaaggacgattgggacggcagcgtgatctcgctgctcaactaccccgacatagtgaagatgatgagcgacgatctcgactggacgcagtcgctcggcgatgcgcttaccaaccagcagaaggatgtgctcgttgccatccagcagctgcgcgacgaggcggtggcgaagaatatcatcaagacggacgacaaggtgacagtcgtcaccgagaacaacaatgtggtgatccgcccgaccgatccggagaaggtctacatcccgcagtatgagccgcagatgctctatgagccgggttacgcggtcgagccgatctcctattatccgagcgcctacgacaattattattatccgggcgccgcgttctttgccggcgcggtcaccggcgtggcctgggcggcgatcgtcaactgggatgattggggggtatggggtggccgttggaacggcgatgtcgatatcgactgcaacaattgcttcaacgaccggaatttcaacggcaaggtcaagtggaacgacgtcgactggacgaaggtcgatcgcagcaagctgagcatggacaagagccagctcgccaatctcgaccgatcggcgatcaggtccggccttgaaggcgacaagcgcaaccagctgaagaaccaggtcggcgatcgccgacaggatttgggggcagggggacgcaacacggccgcacgcgcagacgacatccgcaagggcaccgtcaacggcctcaaggccaacgccaatccaggcgccgcgaacagggcggcgcagaaccggccgaatgcggcgaaccgtcccgcgaatgcgtcacggccggacgcccgtcccggcaatgccggggccaatcgtccgtcgaagccgtcagggaatgtgaaaaaaaagtcctcggcgccgaagatggcggcaagacccgacaaccgctcgcggcagccgagcgcgctcggtaacccgcaatccggccgccgcgaagccatggcgtcgcagcgtggcggccagagcatgggaggcggtcagcgcggcgccccgcgggccagtcgcccaccgccccgatcttacggtggtggcggcggcggccgtggcggcggtggcggtcgtggtggcggcggaagacgataggatccgacgaagtttatcgagccaatggaggcaaccatggcattgcgattgaagttgatgcgtttgctggttggcgtggtgctgcccttgacgttcgcaagttcgtccgtggcgcagaccgccctatcggagttcatcggtacggcatcgccgccgtccttcgacacgccggaactggcgctcgaccggttgaaggcggtgcttgcatcgaacgacgtggacgggcttgcggggctgctcggcctgaaggccgacaagctcaggggaaacaatgcggcaatgatcagctacgggctgatccgcgaaggcgcgtcacggctgatgaggctggaggaccttgatggccgcaagatcgtcgccatcggagacaggctctggccgctgccgtttccgctcacgaagggtgccaatgacaaatggtcgtttgacacccgcaccggactggaggagatcgtcaatcgacgcatcggcgagaacgagctcgcgacgatcgagaccatccataatttcgtcatcgcccagcacatctatgcctctgaggatcggaccggctcgggcatatacgagtatgcgcagaagctgatcagcgctcccggcaagcgcgacggtctgtactggcaggcaagccctggcgaggaagacagcccggccggccctctggtcgagaccgccgccttcggcaaggccaagcgcggtgacggctatttcgggtaccgctatcggatattgaccgcgcagggcgataacgtgctgggcggcaagcagagctatatcgtcaacggccatatgacggccgggttcgcggtgatcgcgtggccggtcaaataccgggtgacgggtgtccagacattcatcgccaacggcacgagcgtgatctaccagcgcgatctcgggccggagacggagaagaaggcggccgcgatcaagacgttcaatcccgatgaaaactggtctgtcgtttccgaatagaccggaacgggttcgggtggcggttgtccgaagcaaccgccacccgtgaagtcgatcagccgaaatcgagaagcccgacggggcgctattttaccgggggctcccaggtcaggaacaggccgacatcgccggggatgccctcggggaagttgatgatcatggccttcagaccatagccttgtggtttggccagttgctcgaacatgtcgagaagttccttcgccttgccctgaagcgtcttctgccatccgggcaggttgttgttgatggcgcggccgccatcgtcgcagaagctcgaggggaagctgtagatcatcgcttcgtattttccgtccgccgcggccttcatgacgaggcgcttgatcatagcgcgttctttctcgtcgatatgcttgcgaaagaaatcctcgacgaactcggcgtgcttttcagcctcccgcgccttgatcctctcgtcgcgctccatctcggcgatctggagctcaagggcgcgtttgcgcagttcttcggcgctggccatggaatggggtgcggatgtctgcgtcgatgtcatctctacgtcctccaagttcatcctcaagggatgatagggcctatggagaagcgaaggcagtatgatacgcgggggtggctgtaagatacggtatgttacggctttggcccggatcgccccggaaaacaacgaaaacaccggctgcggcgaccgataccgccccgcttccagcggcctgccgcctgcgcttgccgaccgacgaaacgaatgtgcgttacggtaatatacgctccattcgcgcgacatcatgcgatcgtcccgcccgtcgatctaaccagccggggacggacaggatgaaaaagataagacgagggattttgataacggtcgttgcgtgtctctccatgggtcttgccggggaaacatccgcgcagacgatgagctacgcggatgcggtgacgaaactcgcaagcgattgcggcgccgacatccagaagctgtgcaaggggctgaaccttgggaatggacgcattgccgactgcctgcagcagaacgcggcgcaggtctcgccgagctgcaaggcttcgctgagcaccgtcttccaatcgatcacccagcgcgagcaggcgcagacggcctatgagcgtgtctgccagcgcgacatgtcgaagagttgctccggcatcaagggcgacgggttcgtgctcgcctgcctgatcaagaagcaaccgcgtgtcagcgacgaatgcaatcaggcgatcaccaacgcgggctggagatgagacgatgaagcggtttctttcgagagcagtcattttcgccgcggcggcaatcctttctcccgcccttgcgtcggcgcaggaggtgtcgcaggagcgcatcatcaacgggctcggcaaactgacatccgccgccccgactatcgatcttgaaatcctgcggcaggaggcgatcagcggtggcgacaagccgatgtcggcgctgccgaactggaaacggatcgccaagctgccgcagatggtcgtcgagatcaatttcgagaacgattccgtcgcgattctgccgagctcctaccgcacgctcgggctgctcgccgatgcgctgcaccatccgaacctctgggactacaagttcctcgtcgtcgggcatgcaagctcgaccggcgatgacaagtacaatctcgacctcagcgaaaaaagggcggccgccatcaaggaggccctgtccacgaccttcgcggtcgatccgcagcggctttacgcggtcggcgtcggcgaatacatgccgatcccagggacagatagcacgggatcgaacaaccggcgcgtacagctcatcaatctcggggtcttcaagaagaagtcctgagcgagccgggcagggcaggggacgtcccgtgtttcgctcgttatcccatggccatgttcaagccgtcccgccgacaggcagcgggacggctcgcgccccgcgttcatgaagccgttcgtcgatgcgattggtacgaactgcgagacccattcccggcctgctgctatcttggctgttgcgcgcaccccttgccgatggtcacggaaccggtagcgctaacaaaaacttaacaggaataaaactagatcgccgtctgctgcgtatagcttgccaaaatggcatgaaatgacgtggagcagcagttgcgtcttttaataatggtgcttggtatactggcaatactcgcctggattgtgactttctatctcacttcagcctattattagcattggttgagcagtcgctggttccagccgcactaaatttcgaaagtgggtctagcctgccgctcaagcaacaggctagacgctttaaacgcccaatcagaggacagagacgttctcagccttcgacttgccggtcttgcgatcctggccgagttcgaagctgaccttgtcaccttcgcggagcgaggcgccgcgcgggagcgcggtgatatgaacgaaaacgtcggttccgccgttttctggcgtgatgaaaccgaagcccttgtcctcgttgaagaatttaacagtaccctcaggcatggatattcccttttaagtgttttgcttgcaatggcgacgcgaacctatagtgctgcggcgcgtccatcaactagaagcatgcgtcgaagccgcttcatttgtatgaaattcggatttttgccggtgcgaggcccgatttggcgtctcttcaagcgccgtagcgccaaaatcgacaaagtcccgttgcaccttgcgcggcgtgtcctctggaaaagaaagcgacgatgaccattccagctgatttcgattgccagacctgcggcgcctgctgttcgtactcatcgagctggccaaggttctcgaccgaaacggatgccgagctcgaccgcctgcccgcccgcttcgtcgcggatgaccaggcgggcatgcgctgccatgataaccgctgctcggcgctggacggcacggttggttccggcacttcctgcctggtctacgagatcaggccgcaagtgtgccgcgactgccttcccggtgacggcgaatgcctcgaggcgcgcgccgcctatggtttcgtctagcccgctcttctatccagataccgccgcatcgcatcgaaggaaaaagcgccgatcggaagctcgcttccgccatcaagggcgagatcggcgaggatttccccgaccacgctggtaaacttgaagccgtgtcccgagcagggcgaggcgatgacgacgttggcgctcgatggggcgatgtcgagcaggaaatcctcgctgggaagcatcgtgtagcggcatgtcgtggcattggcccgcacgccggccgcagccggcaggcgcttgccgatgaagccgtccagcaatgcggtgtctttatcgttgaccggcgggttcggctggttggggtcgatcggctcgcggaaatgcgcatgtcggccgaccttgacgccgtcgacaccgatggccgggaagccgaaataggagccctcgtcaccctcgtcgcgcaggaagcacggcatgcggccgggttgcgtgacgaagccgtctttgggctggtaccaggcgacgacctgacggatgggaacggcatggccccgcaattccggcaggagttcggcaatccatgaacccgtggcgacgatcaccctgcgagagcggtacgttccctcggcggagcggatggtgacgcctgcgtcgtcgtggtcgatcgctgtgacgcgttcgccgaaatggagcacggcgccatcttcggccgcgagcttcaaatagcccgaaaccgccgtttccggccgcagatagccgccttgcgggtcgagtacggcgatatcgtcccggtcgagctggaacacgggaaagcggcgggccgtctcgtcgcgatcgagcacctcgtgcgccagtccatgcatggcgcaggacgcccgtgttccgctgacgatcttgctgtcgggagctccgatctgcaagacgcccgttatctcgagcacgttcgcccgcagcctggcttcgagcgcgcgccagttccgataggcgcgttgcagcagcggcacataggaggggtcttcgaagtagccgagccggatcaatcggctgtcgccatgcgacgagccaagggtatgggcgggatgataggcatcgatgcctatcaccttcactcctcgggcggcgaggaaagccaaggcggcgctccccattgctccaaggccgacaacggcgacgtcatattgagcagtcatggcttttccttcaggcgatgggaggcggcgtgtgcctgatcagcgcccgcgcgtgctccatatcgagcgatagcggtctgtcgtcggcgtagtgggggacgacgctgcgaacggcgacgtggagcctgtcggtgccgaccgcgcgtcgcgccgttgacgacagaaaatcgtgcgcctgggccgccgccatcaattcgatggcaagtatgtattcggcgttgtcgatgatcgagagaagcttgtttgcggccgccgtcggatgggccaggaaatcttcctgcaaggccgatgtcagtccgccatccagcgacgccggggcggcaagccgccggttttcgttgctcaaggcggcggccgtgtactgggcgatcatgaagccggaattgcttccggcatcgcttgccagaaacgccggcaggccgctgacaagcggattgacgagacggtccatgcggcgctcgctcatggcggcgatctgcgcaagcgcgatgccaaggctgtcggtcgcctggccgagcgctggcgcaacggcatgcgcttccgatgagacgataggcgcatcgggtgtgccggataccgcggggttgtcggtgacggaagcgagttcgcggtcgaccacggcacaaaccatgtcgaatacatcgcgcgcggccccatgcgcatgcgggaccgatctcaggctcagcgcatcctgcgtacgcttgccgcgcgcggcctcgatcaggccgctgcccgcgagatagcggcgtagccgtgcgcccacgtcctggatacccttcgaatgtcgcagcgccaggacctccgcgtcgaaggctgccatctggccgccgacggcctcaagcgtgagggcggcgatggcgtcggcccaatcgagcaatcgctccgcccgcgccagcgccacgctggaaaggccggtcgcgcaggcggtgccgttgacgaggctcaatccttccttggcgccgagcaccagtggcgcgagatcgagcgctgcaagcgcgtcgcggccggacatggatttcccggcaacatgcgcactcccctcgccaagcagcacgagcgccgtatgggcgttgtgcgtgagatagccggccgagcccttggagggcacatcgggaatgcagtcgcgtttcaggaatgccaggagatagcgaagaatatcgggccgcacgccggagtgaccgtggccgaaattggcgatctgggcggcgatgatggcacgcacctcgcgtggtgcgagcctgtctccgaccccgcaggcatggctgaggacgatgttgcgggacaaacggctttgcgactggcgatcgaccaccgtatcggaaagcgcgccgacgccggtgttgacgccatacgcccggacaccggtctcgacgatccgctcgacgatgcggctggcgttttccacgcgctgccaggcggcttgcgagagcgccagcgtgtctcccccggcgacgcgggcaatatcccgccagccaaggacgttattgaggacgactgtcattgcccggttccgaagtgaccgatgaactggcggaacgccggtgagccgccaccgccgaacatttcgtcgggcgtgccgctgctgtcgacaacgccttcgcgcatgaagacgacccggttcgagacgttgcgggcaaagctcatttcgtgggttacgaccagcatggtcatgccttcttcggcaagcgcgcgcatgacgcgcagcacctcgccgacgagttcgggatcgagcgccgacgtcggttcgtcgaacagcatcaccttcggcttcatggcgagcgcgcgggcgatcgcggcgcgctgctgctggccgcccgaaagatgggccggataggcgtggcgcttgtcggcgatgccgactttctccagcaaggcttcggcctccgcgatgcattccaagcgcgggcgcttcaacacatgcaccgggccctcgatgatgttctgcaggatcgtcatgtgagaccagagattgaaggactggaacaccatgccgagttcggagcggatgtggtcgacctgcttctggctcgccggtcggctcttgccgcccttgtggatcatcctgatctgttctccgtcgacccagatttcgccgtcggtcgcggtttccagcaggttgatacagcgcagaaaggtcgatttgccggagccggaagcgccgagcagcgagatgacatcgccatcctgtgcatccagcgagatgccgcgcaggacttcatggatgccgaagctcttgcggatattgcggaccgaaagtcgggttacgccgggcatgggtgctccatcggtttggttctgctcttatgccttcaacgcgggcggcgcggcgcggcgatgtcgcgaaagcgagtattcaagcagggccatggcctgcaggattatgaagttcaaaacgagatagatgatggccgcgcaaaggaagacttccatcgtgcgataggtctgcgagatcaacctttgcgcgacgccggttacctcccagacggtgacgaggcttgcgagcgccgtcgatttcatcatcagcacgacttcggtggaataggcaggcaaggcgtgacggaacgcgatcggcgccagaatgcggcgcacgagcaggaagcccgacatcccgattgagcgcgccgcttcgatttcgcgcggcgagacggcgcgaatgccgcctcggaagatctcggccgaatagccggccgtgcacagtgccagcgaaagcacggcgcagatgaagggctcgcgcaggaagggccacaggaacgaatagcggatgaagccgaactggccgagaccgtagaagaccaggaacatctggatcagcaagggcgatccacgaaacacgaagatgtagcccttggcaaaggcggagaggactgggttgccgctgacgcgcatccacacgatcaacagcgcaagcaggcaacccgagaccaccgataccgaaaacagcgccagcgtggtggggacggcctttagcagcgtcagcatggtctgggtgagaaaggcgatatccatgggcttgtccttatgcctttcccatcgccgccgtcggcatgctgcggttggcgcgtcgctcggcgccgttgaagacgcggtcggacaggctcgtcaggatcagatagagaatgccgccgacgatgaagaagaggaaatactgccgcgtcgagcccgccgccacctggctggtgcgcatcagttcggcaaggccggtcacggagatcagggccgaatccttcaggctcagctgccagacattgccgatgccggggatcgcgaagcgaaagacctggggcatgataatgcgacggaagcgcagggcgcgatgcatgccgatcgccgacgccgcctcgagttcgcccttggaaatcgcctggaaggcgccacgaaagacttcggcctgataggcgccggagatgatgccgacagccagcgcgccggcgatgaaggacggcatgccaaggaagccctcgtaacccatcgccttgccgatcgcggtcacggccgaagaaccgccgaaatagatcaggtagatgatcagaagctcgggcacgccgcgaaagacggtcgtgtagatattgccgagcgtggcgagcgccagattgccggatagcttcgcggccgcgacgatcgcgccgatcacggcgccgatcgcgagcgctgtcgccgttacgcacagcgtgatgaaggcggcaaaaagcagaagcgcgccccatccgccggagccgaatccaatcagtgacagtgatgccatggcgcgttccccgcgtgcgtcgctcgatcgacgttgtcagacatgcggtccccggcgcgagcgccggagaccgggccgtgttcgcctcaggccttactgctgcgggctgacgtcgaccttgaaccacttcatcgacaggttcttcacggtgccatcggcaagcgccgacttgatcgcttcgctgaacttgtcgcgcaggtcggtatcggccttgcggatgccgagcccttcgccttcgccccagatcggcccgatgatctccggaccggtaaaggcgagcgcgccgcccgcggtttcgaaggcgctgttgaaatagacggcgtcatcgaagccgagatcgatacggccgttctgcagatcgaggtcgcgatcggcgcccgtcttgtactcgcgaatctgggcgatctcgccgaaattgtcgtagacaaacttggcatagacggtggcggcctggatgccgatcgtcttgcccttgaaggcttccttcagcgcgtcgatttccttcacgccggtctggccgggcgtcatcttgatgattgcgccggtgccggcggcattggcgagcgggctgtccttggcggtggcgaaagcggccggcgtcgcggcgtaaggcaccgtgaagtcgatgatctgcttgcgctcctcggtgatcgagagtgcgtccatgatgacatcgaacttgccggcgttgagcgccgggatcatgccatcccagtccgaggcgacgagcgtgcattcgatcttggcgcgttcgcacaggaccttcgccagttcgggttcgaagccgccgagcgtgccgtcggcattcgtcatgttccacggcgcataggcgccttcgagcgtgatggtggcggtcttccagtccttggcggaaacgggagcgacaagcgccgaaagcgcgacggcgctggaaagaagaatggctgcgagtttcatagagatctcctctgaagttgttggtggccctgcggctgcgtaatgccgatctgcgccggcttgcctgtcgtccttcgaagagaagttgatcaggtagttgtatagggtaccatatgagataatttatgatatgcaagaggaaagtcgattgaatgggcggatttcattcgtgcaaaaggaataggcaatgaagcattccagcgagatgaagcgtgaactggcgcagaacgatagcgccccgctctatgtcggtgtcaagcagatgatcctcgaccgtatccagagcggcgaatggccgccgaaattccgcgttccctccgaaaacgaattggtcaccgagctcggcgtcagtaagatgacggcgaacagggcgctgcgcgaattggcggcggaaggggagcttgttcgcatccagggcgtgggctcgttcgtggcggagcgcaagggctattcaccgctgttcgaagtcaggaacatcgccgaggaaatcgccgagcgcgggcattcgcatgaggcatcggtcattgttatcgctgaagaaccggcctctccggagaccgcggacgcgctcgatctggacatcggcgcgccggtctttcattccttgatcgttcacagcgagaacggtgtcccggttcagatcgaggatcgcttcgtcaatccggccactgcgccggattatctcaagcaggacttctcatcgcagacgccgaacgcctatctggtggaggcggcgccgctcagcggttccgagcatgtggtcgaggctgccatgccgcaggcctgggagtgcaagctgctgacgatcctgagaagcgagccttgcctgaccattcggcgccggacatggtcgggccggcaggtcgtctcgacggcccggctcgtctatcccgcgcaccgctatcgcctggaggcgagaagcggcaaggtttttgaagagcaatagcttatgttgtatatggtacttagggtataggcgcgatgttaccaagcgtcacgcgctgcgagccggaccggtcgaggacgcggtcagtgactttgctcggtgggaatcaggccgatccgtacggtttcgacgaaggggaaagagctttgggatttgccgtatcggcgccatgctcgccggcaatccacctgaccacgttgggtcgagctgcgcgaaccggcgcttcctggcttgcaggcagcgccggacatatgcgcgtgaaagatggcgccatccgctggcgccgtccttatgcttagaagcttacgttgagaccggccttgagcgtgtggtcgcggacgttgcccgtcgtgccgacgccgttggagtaggtgcgcacgctgttggtgatcacgtagttgtattcgacgcgggccgaaacgttggacgtcagtttctgctcgacgccggcgccgaggatatagcctggcttccagccatcaggaccggcaacattgccattgtcgcggaagttggtcattgccaggccggccgttccgtaaatcagcgtctggtcgatcggcgcgccgaccttgcccttggcgctcaggcggtgacgctccttgatccggccgccttccaccttgacccggctgtcgccgagataggaggcttcgacttcgccaccaacgaccgcgccgccaacggtggtgttgtagcctgcctgtgcgccgacgctcaggcccttgttgccggaaaacgggttgaggttcggcgaggacatgccgccgctagcaccgacataggcgccgtcccatccgcccgcggacggctggtcgtaggaacccaaatcggcggcgagaaccggcgtggcaagaaggctgatggcaagggctgccgcaaagggattgatactcatgattacgctatactccatacgcattgctacgcaccttgtcgcgcgtgagcgtttactcgttaaaccacgtcatttggatgcaatgcgcccggaatttcgccccggaacgtagcattgccacgatcgtccatctctaattttcacgatttcataaatagtttcttaacttgctgaccaatctcgcagatgtgaacggctctgtatttccggcgttcgatggctgaggcaagcggtactgtggacggattcttctgcgccgcagcatgaattctcggtccggcgattgccaattgcaatgtattgcagcatggtgagtatgagctttaacttatgatccagccgcgaaggtgatggatttgatgagtgatgcatcgaaaggaccggtaaaagtgccgttgcggaacaatatccgcagatatacccggtcggtattcttgtttctcttgccgtgcctcgcgggcacggcgctgtttcttggcgatccacagcggtttgagagcgtcgctcgctatttcggagttcaaatatccgaaaattcaccgcctcggcccgtgttggtcgagcctgccgccgtgtccacgccggcgccgccgcgatcgacagatatccccgttcgcctcatcgaagctccggagccagaggttgcaggccagttcctgcgcatgtggcgcgtgtccgggccggtgatctgcaaggcgcttcgtgacgccggtatcgagacaagcgagtggcgcgcgccgtcgatgcgcagcaccagtcgcgaatgctatttccagcgcatatacagaaggaacgacgttcgtccgctgagttcggttttcctgcgggtcaagggtagcgcaagcggcgacattgtcgatatcagaggaaaacttgtcggcccgccgatggacgcggaaggacggctggatgccggccatatgaagatattcgaaaccttggtgcggcaggcgggatggagtgactttcaggatgcgctcgcacccattcgaagtcttcgcgacttcgagaacgagcggttcggtgcctatttcagtttcaagcgggatgccgcgagcgcggatagctacaatttcatgcttgtggtcgctgccggctcgggaccgcagacgcgaaccaaggcgtacttctcggcagagcgttgggtcgaggcgcccgatccccggatcacggaactctccgtgccgataagccaactggcgtcgaaacagggtgcgtatcggcaacaaggcgtggcgtcccgttgaccgggtgcggtcaccggctccaagcgccgcagatcgcccgcatcatccgcacgatcgcctggtcgagggccgggtcgaccggcaagcgctgcgaagacagcttgacgatcacggtttcgctttcagggtgaatccaaatccactggccatgaataccgatcgccgccagttctccggcgcccgtctcataccagtaattgcgatagctgccctccggaaacagatccagctgatctccatccttccatgcctcacggcgcttgcgcgaccagaggtcggcgatgaaatccgctgaaatgatcccggcgccgcgcctgcgaacgaggtcgcctgtcagggccagatcccgcgcggtggccgaaatgccgcccgccgcgcgtgctgtgccgatacggtcaacggtgacgaaggcgtccgtcgcggcaccgacgaccttccagagatgctcgctgagaagcgatgcaaaccgcgttcccgcggcccgttcgagaacgatgccggcaaggtcggtgttgggcgagcgataggcgtgcctctcgccgtgttgtccggcacccttgccgatgccgcagataaagcgcttcagatcaggcgcgggatcgccgggcttttcggggttccagccggtggcgcgacgatagcgctcgaagccgccggatgtatcgagataactctccacgaaatcgacgctgatctccatgtcgaaaagctgctgcaccgttgcatccgcataagcggaaccgatgacttcgggcacatacacgccgatcggcttctcaaaggagagcaggcccttgtccgccagaattccggcgagcagtccggtcagggatttggagacggagaatatgatatgtggacacgttggatcggaatgcggcgccgaccagtcggcgatgacgctaccgtttctcatgaccacgagttcatctgtttcgctctcggccagaaattcccgtagcgatgaaggcgcatccgtcacacccgcgaacgaaatgcctgatagcgcgtcgaagccgattggcccggcgtgttctgcgccgcgcgcacacggtatcgtcgccgagggaacgatctcgctgacatgctcgaacgaccagcggctgtggggggcggtgcgccagttggcgagcgtcacatccgcgcgatcgaaggtggtcacgggcttatcctcaggcattcgattttcatcccaatcggcaatcaggcgccttcgaaaccggtgagcacgctcaccacgttgacgccgatctcctcgacggcatagccgccttccatgacgaagagggtcggaagcccgagctttgcgatccgctcgccgatcttcgggaaatcctcggttctgagcttgaacctgctgatcggatccttctcgaacgtatcgacgccaagcgaaacgaccaccacgtctggggcgtaggaaagcagtctgccgcaggcgtcctccatcgactggctccacctcgtccagtcggtaccgaagcgcatcgggtagttgaggttgaatccctcgccggcgcccactccccgttcgtcggcatggcccagaaaataggggtactcctgcatcggatcggcatgcaggttgatgacctggacatcgtcgcgcgcgtagaagatctcctgcgtgccgttgccgtggtgatagtccacgtcgaggatcgatacccgcttggcgcccttgtcgcgcagccattgcgcggccaccgcggcattgttgatgtagcaataaccacccatgaatccggcgccggcatggtggccgggcgggcggcagagcgcgaaagcggcgcgttctcctgattgcaccaggccggctgctgtcagcgctacgtcgtaggaggacttgatcgcgtcccaggaaccctggacgatgccgcagccggcatcgaacgagtagtagccgagcaggccatcgatgaattcgggtcgcacatcgccgcgcaggccgcgtgtcggccaggtaaacggcagcgcggttccagagcgtccctccgccgtccagcggtcccagatcgtcggcaggaagtcgaggtaatccttgcggtgaacccgcgccgccgtcgtcaggtcatgctccacgggctcgatgatcctaccgagcttggtcgccgtgacgcgggcggcgatatactccgcccgcgacgtcagctcgaaaccgggaacaatagcgcccgccaccagctcaagctggtcggcatgcccgcgatgacggggagaaaagacggtcttcatgcaaatatccgttgtctggaaaggattgcaccccgcgcgatcacgggcggggtgcgcgaccgggcctatttctgcaattcggtccagatcttcgtgtagagcgcctgaacttcaggcgggcaggtctgggaaggcacgccgactggcgcgaattccgccggaatagtgatctccggcgcgtccttcatgtccgccggcatgaacttgtcggagccggcgatgccgttcgcgtagcggtggaaaccggagttcatacccgcgttctccgggtccatcatgaagttctggaacagcttggcgttctcgacgttcttcgcgtccttgaggacggcgaggttgtcgctccagttgacgaagccttccttggggtacccgaacttgatcgcggggttcttgaggcgctggcggaaggccgaaccgttccagtcgctggacgcggcgaagtcgcccgagcccatcttctcgatggtgccgtattccatggcgacccagtctggcttggccttcaacagcgtgtcgcgcactttcttgagcacggcaaggtcgcctgtgcacttcttgccgccgttataaagcaccgccgcgtcgatgacgtcgatcatttcggggacgacgttgaccttgcccttcagctccgacggcgtgtcgaagatgatgccccaggtgttgatgtcacccttgtagacgtcggtattcaccacggtgccaacgatgcccatcgcccaaggaacggtatatttgcggccggggtcgaagtcgggattggcccactccttggccacgttcttgaaattttccatcttgtccggatcggtctggagcagcaggccctcggaaatccagatcggaatgtagttctgcgagggtacgaccatgtcgaagccggagccgccctggcgaaccttggcgagcgccgtgtcgttggaatcgtagtcggtgatcgtcaccttgaccttgtatttgtcctcgaacttcttgatcatctcagggctggtgtagttgccccagttgtagatgttgagctcaccctcggcgtgcgcgaggcccgcggtaccaaggagtgccgccaccagggcgattgtcgaagtcatccgtttcatgcgcatgttccctctcttgttttcaggcacgttttcgattgacgacaaagaagatggaaacgacgaggatcgacaggccgagaaacagcgtcgagatcgcattcatttcaggtgtgatggagcggcggatctgtccgagcatataggtcggaagcgtgtcctggcccgcggacttgacgaactccgtgatgacgacatcgtcgagcgagatgacgaaagcgagcatgaaaccggcgagaatgcccggccacagcagcggcagggtgacatggcggaacgccttccatggcgtggcgtagaggtcggccgccgccttctccagcgtcaggtccatattttcgagccgcgcgcggatcggcagataggcaaaggggatgcagaaggccgtatgcgcggcaatgaggtagccgaggccggagtagccggtccagatcttgatgcgggagaagaagatcagaagcgccacggccgtgacgatttcggggatcatcagcggttggttaatgaaggcgtatttgatcgtcaggccgcgatagggcgcggttcgcgtggtcgccagcgccgccatcgtggctgcgatcgtcgagacgacggcggcgatcgtcgcgatctgcagcgagcgcagcgaagcatcgatcacctgcctgttctcgaaagccttctcgaaccagcgcaacgacacgccgtcgaacgaggcgagcgactcgccggcgttgaacgaataaaagaccagcactccaatcggcagatagagcgccgcgaagcagaccatggcgatagtggtgaagccgcgttggcgcctgacggaaaaggatctagccatgccggttctcctgcgccccggcgttgcgcacataaaagagcagggcgatcatcacgatcatcatcagcgtgatcgacaatgccgatcccagcggccagttgcgcccctgcccgaactgcagttcgatcagattgccgagcatcaggttcttgccgccgccgaggatgctcggcgtgacataggcgcccagcgccgggatgaagacgaggatggagcctgcgatgatgcccggcttgaccaacggaatgatgacgcggcgcaagaccttggacggcgtggcgtaaagatcatatgccgcctcgaccagccggaaatcgatcttctccatgctggcataaagcggcaggaccatcaaaggcaggtagacatagaccatgccggcgagaatggcaccgtcggtaaaaagcatctggatcggcttcgagatcatcccgaagcgaagcagcaaactgttgatcagcccttcgttgcgaatgatctccaggatcgcgaaggtgcggatcaaaagattggtccagaaggggatcgtgatcaggagcagccagagctcgcgcgtcgtctcccggcgggtggcgatgaaataggcggtcggaaagccgatggcgagcgtcagaagcgtggtggcaagcgacagggtgaccgagcggatgaagatcgagacatgggcatccgccagcgacagcgaaccgtcgaaaatgtcctgctgcagcgcgacgctgatccatccttcgatggatggcaaccagacaacgtcgccgtaaggccctggcgtcagaaacgaataggcgacgacgatcagaagcgggccgctcgcggcggcgaggatgatcagcagggcgggtagcgaaagaagccagcgtgtccggatatcccggctcttctccgcctcaatcacgtccgccacatcggtcatgtcagttcctcagcaccctggcggcattgggctctatcgcgatgccgaccctgtcgccctccgcgtaccgcgccgcctgcagcggcttgttctgctcgcgcagcgtgaacagggtttcgttgtcggcgaggcgaacgtggtaatgcgtatccgtgccgaaatagacgatcgtctccagcgtgcccgtcatctggcagcgtgcatgatcggtcggtgtgcaaagggcggcgtgttcgggtcgcaacaccagggtgacctctccatcctcgcctagattgctgggcattgtcgccgaaatgcggccggcagcggcggtgtccacctccgcgatccctgaattcaccgcgtgaatgcggcccttcaggaaattcgtctcgccgatgaagtcggccacgaaacggtcggtcggcgcatcgtagatctcgcgcggattgccgacctgcaggatctttcccgccgacatcacggcgatgcgatccgacatggtcagcgcttcttcctggtcgtgggtgacgaagatgaaggtgatcccggtttcggcttgcaggcgcttcagctcaatctgcatatccttgcgcagcttgtagtcgagcgccgacagaggctcgtcgagcagaagcaccttcggctgcggtgcgagcgcgcgggcaagcgccacacgctgctgctggccgccggaaatctggctggtgcgccggttggcgagcgcttccatgcgtaccagcttcaacatcaccgcgacccggtcacggacctcctgcttcggtcggcccagcatggtcaggccgaagccgatattctcggcgaccgtcatgtgcgggaaaagcgcgtagctctggaagaccgtgttgatcggccgtttgaacggcggcatcgcggcgatgttatcgccgttgagcatgatctcacccgacgtcggatactcaaagccggcgatcaggcgcagcagcgttgtcttgccgcatccagacggccccagaagggtgaaaaactcgttctgtcggatggaaaccgatgcgtcgtctaccgcggaaaaggcgtactcaccaaagccgaataccttggaaacactgcgaatctcaatcgcgttcaatcccgccatatgcggcctactcatggttgctgatggtgctgttcccgccttttcggcttttggctaggtgaccacacgcgttctgcgttgacaaccagattttacgcttccggtagaaaatatttatcagtcggaaaaactaatgtagccgccgcagatggtcgtgaccggcttgatggtatcgagatcatcgggctcgatcgcctcgatatcgctgtcgagaatgacgatgtcggccaagtaaccctgcctgatcatgcccttgcgatcctccttgaactcggcataggcgccttccacgcaataggcggcgagcgcctccggcagcgagaaggactggtcgggatcgctgtcgctccaccgcttgcgcgtgacggccgccttgaggccgaccagtgggtcaatcggcgaaaccggccaatctgaagcgaagcagatatgagcacctgcgtccttcaacgtgcaccatgcatagctgaccggccagcggtccctgccgatgcgtgatatggttggctccaagggcaggccggcgcagccgggtggatgaggaggctgcatggaagcgatgacgccgagttcggcgaagcgcttgatatcatcagggtgcaccacttcgatatgctcgatgcgatggcggctgtcgcgcgcaccgttctcttcgcgcgccgccgcgtagccatcaagcactgcccggacggcgccgtcgccgatcgcgtgaacggcgatctgcaggcctcgccgatcggcctccactgcgaccgcgcgaaacgcttccggcgtgaagaggccctcgccacggtcacccggcttgtctgcgtagggctcgaccatcacggcggtgccgctttcgatcacgccatcgtagaacagcttgacgaggccggacgagagccagtcgctcttgtaggtcgccatcatgcttgaggctttctccagcatgtcgagcgacatgaagttcttgaaatggaaggggatctgcacgcggcagggaaggtggccatcctctttctcgatcgcggcgagcagctgcagctgatagagattgccatccatgttctggaccgtagtgatgccgtggcgggcacaataggcaaggccggtgcgcatcacggcgatgtcctgcgcccactgggcggcatccggatagggctcgggctcaccgcccgtagacaagcccagccgataacgatcgaaacctccggccgcctgaagcgggctgaaggcttccatctccctgagttcgccggtagccagaccgtcggcgcctaccacaacctcgtttccgggtccgagattggcgccgtgaagaatgccgaccaactcgagtgccgcggtattcgcccaggccgtgtgatgatcgggtgcgaagaggacaagcggctgagccggcaggatagcatccaggtgctggcgggtcagcggctctgcctcgccgagaatgttgtagtcggcgccctgcgcgaaaagcaccttctgcgcttggcggccctgcgcgtagttttcgatggcgtcggttagcgcgaccatccctgtcacgcccttcagctgcagatgatccagctcggccgcgccggaaaacaggtgcatgtgattttccgagaagcctggcagaaccgtgttcccgcgcgcgtcgatgatgcgcgtgtcggggtcgcgatgtgcttcgatctcctcgttcgtgccgacggcgatgatctttccatcgccgagtgctaccgcctgggcgcgcgaatgttccggatcgagggtgagagtgcgggcgttgattacgatgatgtcggccgtcgatgtcatgggatgctcgctgctgaaggaatacatgcgagctaagccgatgccgggatcgaattcaaccggctttcgcgcggaaccgatttgcggaccgcggctagtctcgatggaaattagcgctggcgatatcgataaccgagatgttaaattccgcgcgaacttatgcgatggattcatggatgaagcgcgatgaactcggagatcttgccgcctttctgatggtggctgaagagcggagctttacgcgcgcggcggcacagctcgggacatcgcaatcctccctcagccacacggttcgccgcctcgaggagcggatgggtgtgcgcctgctgacgaggacgacgcgaaacgtttcgccgacggaagcgggcgagcagctcgtcgaaactttgcggcccgccttcaatgatattcgcggccggatcgacgccttgagcgcgatgcggcagaagcctgccggtacgatccgcatcacgtcgagccggcatgccgcggagaccattctcatgccggtcgcaaagcggctgatggcggagtatcccgacatcagcatcgagatttcgatcgagcagaggctgatcgatctggtggccgaacgctacgacgccggcgttcggctgggggagcgggtcgagaaggatatggtcgcggtcaagatcggaccggagttgcggatggtggtcgccggatcgccagactatttcaagcgacatccaaggccggtgacgccacatgacctgacgcatcatacctgcatcaacctgcggctgcccacgctcggcggcctctatgcctgggaattcgagaaggatgggcgaccgctcaacgtgcgcgtggacgggcaattcatctgcaacgacgtgccgatgatcatcgacgcggcgatcagcggcctggggctgacctgcctgccggatgatcacctgggtccattggttcaagaggggaagctgacagcggttctggaagactggtcgacgccatttcccggctatcatctttattatccgagccgccgccttgcttcgcccgctttcgcgcttctggtcgatgccctgcgctatcggtgacgacaggacgcaagccgtttatgaaccgctcgcatagcatcatgcggaacggcgcacctagtcctcggcaattgcctggcctatttcgtctcgtgagacaacaggtgaaacgctcataggagtgcgacggtggagattaaaagaagcggcgcgctggcgtcggcgaaggggccggatgactatttcaccggttccgtgcgacttgatgcgcgatttagcggtagcggaaatctgagcggcgcgaccgtcaccttcgagcccggcgcgcgcaccgcgtggcatacgcatcctctcgggcagaccttgatcgtgctgtcggggctcggcttggctcagcgcgagggcggagcgatcgcggaaatccgccccggcgatatcgtctggttcgagcccggcgaaaagcattggcatggcgccgcgcccaactgcgccatgagccatctggcgatcgcggaaatgaaggacgggtccgctgtcacctggatggagaaggtcacggatctggaatacgagggtcgggatgcgccatgaagccttacatcgtctgccacatgatcacctcgctcgacggcggtcttcatccgagccgctggacggccagcccggatggcaaccgggcaatatggtcggccgcctatgaggccatacacaagacgtttggcgccgatggctggctggtcggccgtgtcacgatggccgaaatgtcgaaggctggtccacatgcgccagcgggaccatttgacgtcgaccgcaaggtgcatgttgccaggcccgatgccaggagctttgccattgctgttgatcagcacggcaagctgcatttcaacggcggtgatttcgatggcgaccatgtgatcgtcttgctcggcaagcaggtttccgatcagcatctcgcggagctcgtcgccgacggtgtgtcctatatcgtctccgacggccaagagatggatctggcccgcttgctggaaactctgggacgcgaatttaacatccgccgtctgcttctggaaggcggtgccggcgtcaacggttcgttcttcgcggccgggctggtcgacgagttgagcctgctcgtggcgccggccgtcgatgcgcgcaagggaagcgaccgtgtcatcgaatacgagcaggatggcctggcgggaaaatgcgaactctcgctactctcctgcgacaagctggatgacgggcttctgcacctgaaatacgcggtcaaggcgtcgagctagcagctttcaagcagagcgtcgcgccgagcacggcgcaacgtcttgcttgcagccggggattatttcagcgcttcggccatgaacgagacggcccgggcggcgccttcagccgaaatcgtatgaccgagcccgggaacgatgaccgtctccacgctcatgccaagcggccgcagggccgctgcggcgcgggtcgtttcagcagccggaatgaccggatcggcgcttccgtgcaccagcagcacgggcgtcccgaccgctggcgcaagcggaagcggcgaggcgaggcggccggagaagccgacgacggcgccgactggccagcgtcccgacgccacggcgtcgagcgccatgatggtgccctgcgagaagccgaccagaacgatccgatccagccggtcggcaaagccgttctcgttgatgatcgccgatatggttgcgtcaaaggccgggcgcgcctccttgatgcgcccgcttctgttctcctcggtcacgccggcgacgctgaaccactgataacccgcgccgaagctggacgggcttggcgcattcggcgacgcgaagatggcgccgggcacggcgtttttccagagatcggccaagggcgcgagatcggcgccgctcgagccgacgccgtggagcatgataacgagcataggagatgcggttgtcgacatgactattcctctcggatcgcgaacggaagcaacggaccgacgggcacgatccctgtcgggttgagcgccttgatcgagtagtagccgtgcttgatgtgatcgatgctgaccgtctggcggacgcttggtatcgcaagcatgttgtcgacgtaacgcgttaggttgggataatccgccagccggcgcagattgcacttgaagagcccgttatacgccgcgtcgaagcgcaccagcgttacgaagagccggacgtcggcctctgtcagtcgcgtgccgaagaggaatggtcgctgcccttcgaggcgtgcgtccagttcgtcgagcatcgcgaatacgtcggcgaaggcttcctcgtaggcgacctgtgtggtcgcgaagccggtgcgataaacgccgttgttgagccgtggatagatacgctcgttgagagcatcgatctcggcgcgcagatcttcggggtagagatccaaagcgccatcggcaagtgcgccgaagccggagttgagcatccgcaggatatccgccgactcgttgttgacgatagtgcggcgttccttgtcccagagcacgggaacggtcgcacgaccagtgtactgcgggtcggcgctggtgtagatctcgtgcatgtaggtggcgccgttgagctcatcgcgattggcgcccggatagtcgccgaagcgccaaccctgatcggaaagagccggttcgacgaccgagaccgaaatcacatcttccagcttcttcagcgcgcgaccgatcagcgtacgcgaggcccaggggcagatcagcgcgacatagagatggtagcgaccggcctcggccttgaacccggcctcgccggtaggcccggcgctgccgtcgggggtgatccaattgcggaagcccgaaatttgccggacgaagccgcccttggcgtcggtcgcctgcacgggatgccaatcggcggtccactttccatccacgagcatggctgaactcctgatctgttcttgcgcgttgtcggatggagatatggcccagttccagactgatgattatccggtcacgaagataatatttccttccgaaatggaaacaatcatgtccagtccttgtcccacaccggttggccacgaaaggcgttcgccaggaagtcgacgagcactctgactttcggcgccagatgccgggcaggcggatagacggcgtaaaggccgcgcggttcatcctcgaagtcagacaacagaggaagcagcgcgttgagacgaagccgcgcgcccgcaacgaaactcggtacgcgcgcgatgcccagtcccgcttcggccgccgcgacgcaagcctcggcgttcgagaactgtatgcgtccgcgaacctccgccaccagcgaccgcgatccggccttgtcgcggaaccgccagctcagcggatcgcggaaattggtgtcgatgatgcagtcatgagccgccaggtccgccggcgtcacaggcacaccacggcggtcgagataggacgaggcggcgaccagcacgatgcgcgcggggcaaagcttgcgcgcgatcaggctgctatcgtcgggtcgcccgatgcgcacggcggcatcaaatccttcgtcgacgagattgaccgtccgatcggagaagctgacgtcgagattgatgtcggggaaagccgtcgcgaattgactgagcacgggggtgagttgcgtcgtgccgaaggtgatcggcgcggtgatccgcagccggccggatggcgcgcgcgaggcattgcgtaccgatgcatcgagcgcgtcgaattcttcgagaagcgatttgacgcgttcgtaataggcgcgtccggcctccgaaagagacagcgcgcgcgtcgttcgcatgatcagttgcacgccgaggcttgcctcgagccgcgagaccagcttcgaagcctggccgctgctggtgccgagacggattgcggcggcggcgaagcttcccgtatcaatgacggcaacgaacatccggtcgcattcgagacgatccaagtagttgtccccctaccaactcgccgtaacggtcatccaatgttgactgcctgacatgtggctgccgaggcaaagaataacggcggcgcatggcgccgccggaagacgttgtcagccgaagaccttgaagcgatcgctgtcgtccatgaacgccttttcgccgaaagcggcggagttggcgccgaacggcatctgggcgcgcagcttccacgaggccggaatgttccattcggccgcgatctcggcgtcggccagcgggttgtaatgctgcaggctggcgccgatgtcggatgcggcgagcgccgaccagacggcgaattgcgtcatgccgctcgactgttccgaccagactgggaagttgtcggcataaagcgcgaacttttcctgcaggcccttcacgacgtcctggtcctcgaagaagagaacggtgccggcgccggcggcgaagctgttgatgcgcttttcggtcgattcaaatgcgtcggcagggacgatcttgcgcagtgcgtccatcacgaagccccagagcttgtcgctctccgcgccgtagagaaccagaacacgcgagctctgcgaattgaaggaagacggcgtgtgcttgacggcttcctggatgagcttggtggcttcgtcctgggagatcggcagggtcttgccgagcgcatattggctgcggcgcttcttgatggattcaatcagtgtattggtcatgtggggcactatcctcttatgtggatgcggccgccctaccgctgggaggagcagtgaaacgcggccgacaagaagggatagtccatacgggcgacgatgcatattgcgttgcaccaagcgctgaagatttttttggctacggtttccacggcatttcgtcgcgcgccagtcgctccaactccttttcgtcccgcacgccgaattcgaaccagtcgatcagcgctttggcggtcgcctggccacggtcgctggtcacgtcgcaagtctgttccgtgcaccattgtctcagaacacgatccaacatctccattgcttccgatgtcagcgcttctttcggccagtccgtcttcgtcatcatacccgccctcgtttcgcaccaccgtaacgcgtattggatgccgcgctatgaccgccgaagcacagtcgctcaaaatcgtctatgatcgtccgctatcgaccatgacgttgaaatattggaacgccacaaccgcgcccgcgtttacccgtatcggaggtattgcgttatggacccgaaacgatggagccggccgatctacttccaggcgagcagatacggcgaatttcgaacagtgacgaatacgagcgaagccgcgacggcgctgaatacggcgtggccgatttcgcgcgggcgcagtctgaagacggccaagcgcacctgccaacaggttctgagcggcaagagaccaccttcggaggcgcgaaatgcgttcatcgcggccgctgtcgaggccaatgtctacgtgaaagagcgatagccagaacggacacagcgtcgtcaattcctggtcccgtggcttgagactaaaaatcaggaaaatcttatttagatatggcgcaaggatagaattttaacgatgcattcaatccgatctgaacgagcacatgccactgtgggtttcgtaatctcgagtgggacaatcatgctgacgctgcagaacgccattctcgaaatgatcgccaagggcgagccggtgagcgccgtcgtgcatgaactgtgcacgcgcgtggaggctgcgatcccatggaccgtgtgttctgtgctgacggtcaaggacgggcgcatgcatccgctcgcagggccatcgctgcctcccgcctattcgcaagccatcgacaacatggccatcggcccgctcgccggctcctgtggaacggcggcctatcatggcgtgcctgtcacggtgacagacatcgaaaacgatgctcggtggcaggacttcaaagccatggtgatgcctctcggcttcaaggcctgctggtcgacgccgatcatgagtggcgaccgggttctcgcgacctttgccttctattttcgcgaacgacgcggcccgagccagctggagcgcgatatcgtggacgcatgcgtccatctttgcgcgatcgcgctggagagaaacgaacgcgcactcgagcgtgaggcgctcacctataccgacgccttgacgggtctgcccaacagggcacggttcaacgaggttctcaagcaacagcaccggtccgccgatcggagctggggcatgctgcttgtcgacgtcgataatctgaaactggtgaacgatacattcggtcatggggcgggtgacgcgctcattcaggtcgtggcgcgccggatggccgccaccatgcccaccgaaacgaccttccgattgggtggcgacgagttcgcggtcattctgcatgacggcccggaacccgacctcgccgcgaaggccgaggacatcttgcgggagatcaagagaccggcccaatgcgatagccacgtcatctttccggccgccaccgtcggcggtgcgattgccgcgatcgacgacacgcccgatcaggtccggcacaatgcggatgtggcgctctatcacggcaaggagcgcaatcgtggccagtattcagcctatcatgccgggctgggcaccgccctgacgcggcgcttccgcgccattcgcgatgtcagtgtggcgctggcgcaaaaccgcatcgatgcccactaccagcctatcctgcgcctcgacacgcgcgaggtcgttggctttgaggcactctgccggatgaccacgtatacaggcgatgtcgtctcggccgcgaacttccacgacgcgacgctggatgcccaggtcgcgtcagagttgaccgagcgcatgctttcgcgcgtggccgccgatgtccgccgctggctcgatatgggcctgccgttccagcatgtcggcatcaacctgtcggcggcggattttcacgccggggacctgcaggagcggctgtacagcgccttcgcggcgtcaggtgtacctttgaagcacgtcatcatcgaagtgaccgaatcggtctatctcggccagggcgatcatgtcgtggcaagcgagataaaggccatgcgctcgaaggggctacgtgtggcgctcgacgatttcggcaccggcttcgcctccctgacgcatctgctgaccgtgcctgtcgatatcatcaagatcgacaagtcctttgtcgatcgcctggtgcccggcgatgcgggcgccgtgatcatcgagggcctgatggggatcgccgagaagcttggcatccgtgtcgtcgccgaaggaattgaaacggagatgcaggccgaacacctgcgcgcgctcgggtgcatgctcgggcagggctatctgttccacaaggcggtcgaccgccactcggccgcctggctgttgcaggagttcggccagtgtctggcgcctgaggagcaggcgatgtcacgtcaggcgtaaagactgagatcaggccgcaagcctgagatcctgcccgtggaaatccgcgagtgtcaccacgacgtcgtcgatttcgctttccgtccgcgccgtatcccagccgagcgcttgagccgcaacccttgccatgtcctgcaggcccgccatcgtcaacgcgccctcgatcgcaatcgttgtccggcgaagaacgatatcggagaggtggacgacgaattcccgccgggcgatccagtcgatctccagcaggctgtaatgcccggcatcggaaagccggtcgctgtcgcgatagggtgacgttgcagcgtgatcgaggatttcggatgccgtggtgccgtatcgcgacagcagcgtttcggcgcgcgtgacatcgatgccgctctttcgcgccgctgcctctatccatactcgacgctgagcgggatcggctggaaactgccggccgccgccgattgccagttgctgggtcgactggcgacgctgacgctgcaggcgcttcagcacgagatcggcgacctcctcggagaagccacggaacgtcgtccactttcccccgaccagcgaaacgacggggaaaggacgctccgccgtcgcttccatcaccggtgccgagtggtcgcggctgatgaggcccggagaggaggcatcggaggccggcagcggacggatgccgctataggtgtagaccacctgatcgcggcttaagcgcagcgaagggagaagggagcgcacactctcgaggaaatactggatttccggctcctcgcagcgcaccgtctcgggatcgttcgccggtatgtcggtcgatccgaccattgcgagaccgagatagtcgtagaccaggcagatgcggccgtcatcggcctcgaagtagatcatgtgcccgttaaggcttttcaccagttccggatgatcgagcaggatatgcgagcccttggtaccgccgatcagcttcgagggcgcgtcgagcgatgcgttggcgtgatcgatccatggtccggcggcgttgatgaccagcttcgggcgaacggaaaacgtctcgccattcgcgcgcctgaaggtgagaacgccgttttccgacgagatcagcgtcgtgaagttggtcgccaacgcattgtcgttggcctgaagcccgtccgccacgagttcgtagaccaggcgttccgggcggctgatcttggcgtcgtagtagatgccacccgcgacgatggcgggcgtgacatgcggcatctccttcagcgccttcttcttgaacagaaagcgatggttcggcatcacccggttgcgggcgccgaagaagtcgtacatacgcaggccgatcttcacgagaacggcaccacggctgcgcggtgccgtggtcgagcccgtcagcgtcctcagcgccgcccagatgccgcgcgtccaggagaacacgggaatgaaggtcgggagcggctcgacgcaatgcggggcgttgcgcagcagtagattgcgctccagtgtcgattgcgcgaccagcccgaactcgccggtttccagatatttcaatccgccatggatcaggcgtgacggcgctgaactcgtgccggagccgaaatccgccttgtcgacgatcaggcagtcgacaccctgcacgcaaaggtcgcggaacgttcccgcaccgttgatacccgcgccgaggatgacgacgtcaatgtccttgatcgcgccgaggtcttggaaacgaagcgtgttggcggcggaaatatcgatcatctgaaatcgtcctgctgaatgtcgtctgcgaaccgtgcccggcgggcgcggttcatatctcaagccgatgccttgtccgccgtgagcttgccgatcttcggccagatcggcgccatcgcgtcggcgacctctcggaaaagatcatagcgttcctggtatgcggcacttcgcgccgcatcgggatagcaacggtgcgcgatggccgccgtatcgcgtggatcatgtcgagggcttgcatagaggccagcacccgcgccggcgcaaagggcggcaccccaggcggccgcttcgtcggtttccgtgaccgttgccggcatgccgagaatgtcggcgaacatctgcacgacgcgcttgttgcgcgagatgccgccggcaagcctcgcctcactgaaggtgaagccatcccgcaaggcgtcgacatgaatgcggtggttgaaggcgatgccctcgagcacggcgcgcagcatgtcgccgcgattgtgccagccgccgaggccgaagaagccggcgctggcggccgccccatagggtgagccgaagagataggggtgaaagagcgcggtcagcggacgctcgaaggcggcctcgatctccggcgcgagcagcgcgtgaaccgaaccgccggatgcctcgaccctctggcgttcgctggcgcagagcgtgtcgagaaaccagtcgtagttggccgtcgatgccggcgaaatcgacatgttgttccactggcccggttcgatggcgttgcggcagaaccagcggcggtccatccgcggatgaggcgacagcgtctcgttgatggagtaggtgccggcgatgacggcgacgacgtcatcggcatagccgccggaaccgagcgcggaggcggtgacgtcgtgcaggccggcaacgacgggtgttccgacggccaggccggtacgctccgccgtttgcgcggtcacgtagccgatgatctcgtccgagcgggaaatcggcggcagggccgacgccatctcctcgatgtcgaacaatctcagggcatcgagatcgtagtcctgcgtcctaacattggtgaacgaggtgctcgcctcggtgcgatccgtgccgatcacgccactcaggcaaaagcgtagccagtccttgcacgacaggatatggccgatctctctgtagcgcgccggctcgtgctttttgatccaggcgagcagtgcggatggtgccgagacatgtgggacctgcccggtcagttcaagcgcctcgtcggcgagcggactggcaagccaggcctcgacgatatcgaccgaacggctgtcgagcgacagaagcgcccggccgagaggggcattggtcttgtcggtcagatagatgccgtcgccatgcgcggtggccgcgatcgcggcgatgtcgccggcgggacgtccgctgagttcgatggcctcgcggatggcgtcggccgtctgtgtccagagttcgttcatgtcgcgctcgacatggcgcgcatgcggcatgaactgggtcacgcggcggcgggcaaccgcgatcggcgttccgtcgacgtcgaagatcacggccttggtgacggtgaggccgctgtctattccaagcagacttggcattcaggcttactccggctgatgtggtcgcggacgcgccttgtcctcccgcgcgatgatcacgttgatgtctcgtgatcgcatgcggtcgatatggacggcgggcgtcttgtcgtcgacgatgatgacgtcgaattcgctgagggcggcgaagcgatgcagggcgcgccgctcgaatttcgtgtggtcggccagaaggacgcgtttggcggcgcagtcgaacatggcgcgtttcgtgtcgaccatttccggcgactggtgaaacaccagatcgtccgtgatcgcagacatggaaataaagacgacgtcggcacgcagacggtggatctcgttgacggtggtgcggccgacgaaggcgttgcaccagttataatactgcccgccgagcgccagcaatgtcaggtcctgcatgcccttcaacgcgttgatcagcgtcagcgaattggtgatggcggtgatcggaaccttcgcgggaaggtgatcggccatgggcagcacggtggtggaatcgtcgaagaaaatggcctggcccggctcgacgaactgcatggccgccgcggcgatcatgttcttctccaccgactggcggccagagcgatagacgtcgctggattcgattaggctggaagcggcggcggtaacgatgccgcgcgtcttgcgaaacagtccgcggcttacgaggtcgtccacgtcacgatgggcggtcatcaggctgatgccgaagcggtcggtcagatcctcaatccgcatctgtccttccgccatgacggcctcggcgatcatttgccggcgcaccagctggcgcgtctggcggctgtcgctcgggagttcgtcgatggggagcgcgcctgcgcctatcttctgtgtcacgatggcctctgcgctcgaacgacggatatgcgcgttgtatcgcgaagatacgcaactgtggaggaaaaagggggcgcctcggcgaggcgtccccttgctgtcttactgctcgagaacgaagggagccgtgtacttgtcgacattgtccttggtgatcagcaggcaatcgaagagctgcttttcgctcttggcgccggtgctgccggtcttgatgacgttgtcggcctgcttgacggcttcttccgagaagacggcgaccggctggaggacggtgtactgcagttcgccggccttgatcgcggcaaccgcgtcgggcgaaccatcgaaaccgccgaccttgacgtttgccagcttgccggcctgcttcagagctgcgatcgcaccgagagccatttcgtcgttgccggagatgacgccgatgatgtcaggatttgcctgcagcatcgactgcatcttgttatggccttgcgtacggtcccagttggcgacttccttcgcggacttcaccagatcgggatactgggtcaggaccgactcgtagccgttggagcgggtggcggcgttgttgtcggacggagagccgaagagctcggcatatttgcccttgtcgccgacagcttcgacccactgctgcgcgccgagggccgcgccctgggcattgttggaaacgagctgcgccttggcgaggccttcctggttgatctcggcgttgacgaggataaccggaatgcccgcagcaacggccttcttgacggcgccgacggagccatcggcgtttgccgggtcgaggatgatggcaaccgacttgttggtgatcgcggtgtcgatcaggttgctttcggtgttggtgtcacccttgtgcgcgccgacggttgcggtgtagccgagcttttcagcggtcgccttggcgacgttgccttcggtgagccagtaggggttggacgggtcgttgacgatgatcgtcatcaggccctctgcccatgcggagcttacgaagatcggcgctacggtaactgccgccagaagaacgcgcatgccctttttaaacatagtctctctcccattgatgagttcgtgtggtgccggcttcccggcggtgctttccgcgtcgttgcggagaaggtcttgagcgtgcgtcaggaagatttgacccgacgcccgtattggatgctgttcatgagaacggcgagaacgatgaccgcgccggtgaagaccgtctgccaataggccgacacgccgatgatcacgaggccgtcggacaggaagccgatgacgaaggcgccgagcatggtgccgcgtacggtcccccgtccgccggtgagcgcggcgccgccgatgaccacggccgcgatagccgtcagttcataggtggtgccggcggtcggaccggcggacgtcagctgggaggaaaggaccaggccggcaacggccgcgcagacgccggagaacacgtagaccaggatcttgacgcgcttgacgggtacgcccgagagttcggcggcgcgttcgttgccgccggaagcatagagccagcggccgaaagcggtcttgctgagcacgatggcgcagatgatggcgatggtcgcgagcaccagaacaccgatcggaatgccgccgaggctgttgaaaccgagccagtcgaagccggtgttgccgagttcggggcggccgccgagactgttgtaggtcaggccgttcgtcatcaggagcgcgatgccgcgggcaacgtagagaacgccgagcgatgcgacgaaggcgggcaccttgagataggcgatcagcacgccgttgacggcgccgaccagcgcgcccatcgcgcaggtgatcacgaccacggcccagaccggcggatagaggatgacgccgaaggaggagagcgtaacgccctgcatcaggaagcccgcgatacaaccggcgaggcccagcgtcgagccgaccgaaaggtcgatgccgccgttcaggatgacgagcagcatgccgatcgccagaatcccgaagatcgccacgtgcgaggccatgaccaggaagttgttgaggctgaaataataaggcgacaggaaggagaagaccgcgatgatgacgatcagcgcgaagaacgcgcgaccttccaagagcaggcgtacgatattgaaatcccgccgtggcccgttcgaaactgtctttttgtcgtttgcttcagtgactgacataatcagtgctccataattccgggctagtgcgcgaccactgcttcgccagaggcggccatgatcttttccttggtgacgtcagagctgaactcggcggaaatcttgccgcgatgcatgacgatgatgcgatgtgcgatgctgaggcattcggcgacttccgaggtggagtagatcaccgccagcccctgcttggcgcgttcggcgagaagcttgaacacctcggccttggcgccgatgtcgatgcctcggctcggctcgtcgagcaggatgaccttcggatgcgtcgccagcatcttgccgataacgaccttctgctggttgccgccggagagcgagccgatggcagccgcgccgccgtcggtcttgatgtgaaccttgcggatcgaatccgtcaccagctcgcgctcgcggccacccgacgtgaagagccccttggtgaaggcgccgatgctggcaagcgacaggttggagccgacggtcatcgtctgcaccaggccgtcccgctggcgatcctcgggaacaaggccgaggccgcttgcgatgcggttggcgatgctgaggccggccacgtcgcggccttcgagaaggatgtggccgccgcttgcgtgcagccgaccggcgacgcattcgagcagctcggtgcggccggcgcccatgagtccgtagatgcagacgatctcgccggcgcgcacgtccagcgacaaccggtcgaccgcgttgtaggcggcgccggaggggccaggaaccgtgagttccttgatcgagagggcgaccttgcccatctcgtagccggtcggcgggctgccgaggtcgaagttctcacccaccatgttgcggacgatccattcgagatcgatgtccttgcgctcggcataggcggtcatggtgccatcacgcaggacgacggcgtggttggtgatctgcaatgcttcttcgaggtggtgcgagatgtagacgatcgatacgccgcggctggtcagatcacggatgaccttgaacagcacttccacttcggtggcgctcagcgcagacgtcggctcgtccatgatcaggatacgcgaattgacggacagcgcgcgggcgatttcgacgatctgctgctggccgaggcggagatcctcgacgggggtgagcggatcgatatcctcttccagctcctcgagcagggcgcgggtctggcgctcttcctcggcgaaatcgacggttccgccggtgatgatctcgcggcccatgaagatgttgtcgcggacgctgagattgggcgcgaggctgagttcctggtggatgatcgagattccgcattcgcgtgcatgcgtcgaggacacgaagttgacggtctgtccgtccagcacgatctcgcccgacgtcgggcgcacgacgcccgacaggatcttcatcagcgtcgacttgccggcaccgttctcgccgaacagcgtggtgacctggccgcgatgaatgtcgaagttcacgcccttgagcgcttgcacgctgccataggtcttggcaacgttgcgggcgctgagcacgacctcaccgatctcgcctttgatctggcgttggcttgcctggctcatttgacttcaaccttgacgggggtgacgagccagttcttcgggttgatgagcttgaacacgccggtgacggtgaccgtcttgccggtcagctgcgtggggtcgatattgcccagcaccgccttcttcatctcgttgttgattgccgaaccggcatcctgatactcgatctgattggtgaactggccgaattcgatcgtgcccgtggcatcgcgaagatcggtgccgttgatcgccggtccggtctgcatgcgaatgacgatttcgggcggcagtccatcgacctgtaccgcgttgatattgcccttgcgctcgccgacgacgccggagaaggacaccggcagaaccgggccggtggtcgtcgcgatgccatacttctcgcccgccgccttcttgtcggcgatgaccgcgggtgcaagctcggccgccgcgacggcgcgcttctcgacatcggccgcgatcttcggaaactgctccacaccataggtgtcggaggagaaaacctgttggcgtacgtcgctttcggaaccgatgttgacgaccttcgtgtccagcgcgatcgcgccgacgacaaccacgaccgccgctatgccgaccgcgattttcagtttgccgctcttcggctgggaagccgcgtagtccgtttctatgctcattttctgacaaccttcggcgcggggccggatttcctgttgagggaaagaagaagggatgaggggattatcgacgtcgcgaccggtcagtcaggcgaaaatcgggaaggtcgccggcgaagtcgccaagcgtcgatggggcgccggagccggagtgctggcgtgacgccaagccatgtctggaaacagaaattcgcaccgtcgtgatcctcctcaataacccggcgcttgtttctcctccaaccgccgggcgtgtcacgcagataccgtattagccgtgagctatggtatcgccgtgttatcaatggcagtaaacatgttataaagatctccccttgtcaatcgaccattcggctgcgttttcgatttcggaccatgctggcggccgctgcgcgtgatcgggtctgcccctgacgcgggtggctgcacgacaacgttttgtaattcatcgcattccgggtgcgcgcctgatcaatcagggtagttgatcgcaagttattgataataatgttttattttgatttcgcgacgtcgtgtgcgttggcgccgtatggcgtcctcgcctcggtcgcataacggcacccaatttggcgttttgccgatcgggtcaatttgatgagttacattatagctgaaaaaaattgcgacgacagaaaaaaaattcatttgcggtgataagtttgtgttatattctacatgagacgaaaattcggtgattgccggtttccggttgctgcccaaggcgaggtctttcagtctgatcttgcgaggagcagtcgcaatgcgacgtatttgcctgaacggcggcgctaggcgcgggtccgcggcggtcgtctgggaggagtgaccatgagtgggatgaggatgccgtatccagcggcatggattatcgtgggcggcgaggctttcgatgtctgaacgtggacagatcattatcggcatcgatgccgggacgtcggtgatcaaggcggtcgccttcgagctctccgggcgccagatcgcgtccgcttcggcgcgtaatcagtatcatatgggcgatgacggttcggcgactcaatcattggcgcaaacctgggccgactgtgtgacggcgatgcgtggcctcggcgagaaagtacccggtcttgcggagcgcacggctgcgatttccgtgacgggacagggcgacggcacatggctggtcggcgccggcaaccagccggttggcgatgcctggctatggctcgacgcgcgcgcagcccccaccgtgacgcggcttagcgcgggagccggcaatcgcgcgcgtttcgaagcgaccgggaccggcctcaacacctgccagcagggcgctcagatcgcgcatatggatcgcaatcagcccgaacttctcgatcacgctgaagtcgcgcttcattgcaaggactggctctatctcaatctcacgggcgtccgcgccaccgatccatcggaagcgagtttcaccttcggcaatttccgcacgcggcgatatgacgatacggcgatcgatgccctcgggctgtcgcgccgccggtcgctgctgccggagatcatcgacggtacagaggtcacccatccgctctccgccgacgcggcgcgggcctgtggtcttcttgccggtacacctgtcagcctgggttatgtcgatatggtcatgaccgcgctcggcgccggcgtgcgcagcgcgggtcagaacgcggcctgttcgaccgtcggttccaccggcgtccatatgcgcgcgaaggcggtggccgacgtgcagctcaatgcggagggaacggggtatgtgatcgccttgccgatgcccggcatcgtcacccaggtgcagaccaacatgagcgccaccatcaacatcgactggctgctgcagatggccggatctctgatggcggagggcggcaagaccgtgtctcatgccgatctgatcgcccgcatcgacagctggttcgccgagagccgtccaggctcggtactttatcatccctatatctccgatgccggcgagcgcggccccttcgtcaacgccgctgcgcgtgccggcttcacgggcctttccatgcgtcacggctttcctgatctgttgcgcgccgtcgtcgagggtctcggcatggcgacgcgcgattgctacgcggcgatgggcgacatgcccgaagagctccggatcaccggcggcgcggcgcgttcgcgcgcgcttcgcggttgcctgtcggcggcggtcaatgcgccggtcagggtatcgcggcgcgaggaggcgggcgccgccggcgtcgcaatgatggcggcggtcgcgatcggcgcctatcgcaacatggacgattgcatcgccgaatgggtgacgccgctgctcggcgaggccgaagcgcccgacagcgagcaggccgagcgattcgagcgcctgttcaaggcctacgtaatggtgcgccaggcggttgcgcctgcctgggatcaactggtcgccacgcaataaacggaaacgccgcgctgggccgcgacgtatgcgcggtcgcgctgactgaatttgttgatgcaaagagcatccgaaggagcatgttgatgactgagtccggaatggtggatctgttcgtgatcggtggcgggatcaatggcgccggcatcgcgcgcgacgcggcgggccgtggccttaaggtcgttctgtgcgagaaggacgacctggcgcagggaacgtcgtcgcgctcgggcaagctggtgcatggcggcctgcgttacctggaatattacgaattccggctggtgcgcgaggcgctcatcgagcgcgaagtgctgctcaacgccgcgcctcacatcatctggccgatgcgcttcgtgctgccgcattcgccgcaggatcgccctgcctggctcgttcgcctcggcctcttcctctatgatcacctcggcggccgcaagaagcttccgggcactcgcacgctcgatctgcgccgcgaccccgagggcacgccgatcctcgatcaatacacccgcggcttcgaatattccgactgctgggtcgacgatgcgcgcctcgtcgtgctcaacgcggtcgatgccgccgagcgcggcgccgaggttctgacccgcacggccgccgtctccgcccggcgtgaaaacggcggctggagcatcaccaccaagaacagcgtcaccggcgaaacccgcaatttccgcgcccgctgtatcgccaacgcagccggcccctgggtgtccgacgtcatcggccgtgtggccggcgccaacagcagccgcaatgtccggctggtcaagggtagccatatcatcgtgccgaagttctgggcgggctccaacgcctatctggtgcagaaccacgacaagcgcgtgattttcatcaacccctatgagggcgacaaggctttgatcgggacgaccgacatctcctacgaaggccgggccgaggacgtcgcggcggatgaaacggaaatcgaatacctgctcacggccgtcaaccgctacttcaaggagaagctccgccggcaggatgtgctgcacagcttctccggcgtgcggccgttgttcgacgacggcaagggcaatccgtcggcggtgacgcgcgattacgtcttcgatctcgaagagaccggcaacgcgccgctgctgaacgtgttcggtggaaagattaccaccttccgcgaactcgccgagcgcggcatgcagcggctgaagcatatcttcccgcaaatgtccgacaattggacggagcacgcggcacttccgggcggcgacatgccgaaggccgattacgagaccttcttcaatggactgaaggaagcctacccctggatgtcgcgcacgctcgccggtcactatggccgtctttacggcacccgcacccgcaagatcgtcggcgatgcaaaaggcgtcgaaggcctcggccgtcacttcggcggccatctctacgaggctgaggttcgctatctcgtctcaagcgaatgggcgctgacccctgaggacgtgctgaagcggcgcacgaagcactatctgcacctgaccgaggccgagcagaccgcctttgccgactggttcgccggcgcgaacttcgttgcggccgcctgaggacaccgatcatggcattgaccctttccttgaacaccaatccgctcgtcaatcgcttcgccgagccggatgacctgatcgaaaccgtggcacgggatctgcgcattcgcgacctgcaactcacccacgagttcatcaatccaagctggcaggcgcccgtcattcgcaggctgacccgcaacatgtcggcggcgctccagcgcacaggcgtgcgggtcacgtcggggatgaccggcccttacggccggctcaaccacttcggccaccccgatgccgacgttcgccgctattatgtcgactggttcaagaccttcgccgatatcaccgccgatctcggtgggacgtccgtcggaacgcagttcgcgatcttcacctacaaggacttcgacgatcccgcgcgccgcgaggagctgatcaagatcgccatcgattgctgggccgaggttgccgatcacgcgaagtcggcggggctctcctatgtcttctgggagccgatgagcattggccgcgagtttggcgagacgatcgccgaatgcatgaagctgcaggaccgcctgaccgccgccaacatggccgtgccgatgtggatgatggccgatatcgaccatggtgacgtgacctcgagcaacgccgatgattacgaaccctatgcctgggcgcgcgccgtacccaaggtctcgcctatcatccacatcaagcagagcctgatggacaagggtgggcatcgtcccttcacggccgaattcaacgccagggggcgcatccagccaccggagttgctcaaggcatttgccgagggtggggcgagggataacgagatctgcctcgaactgtccttcaaggagcgcgagccgaacgaccgtcaggtgatctcgcagatcgccgaaagcgtcgcgttctgggcgccccacatcgacaccggcatcgccgacctgcatatctgaacgagaggcgaatcaaaaacagaggcgggatatccgcctggccaaatcgggagagactgtcgatgaacgatcctgaagaatcgctcgcggtgcgagccgcttggcttcactacgccggcggcttgactcagtccgaggtggccaaacgccttgggctgccttcggtgaaaacgcaccgcctgatcgcccgggcggtcgccgaaggcgtcgtcaagatcagcatcgaaggcgatatcatcgagtgcgtggcattggagaacagcctctccgagcgcttcggtctgcaatattgcgaggtgacgccgtatgtcggcgaagacgagtcgatctttcgcacacttggccttgccggctcgaacttcctgaagcgcgagatcgagcgcggcgacaattccgtgatcgggctcggccatggtcgcacgctgtcgacggcagtccatctcctaccgcgcgtctcggcccgcgacctgcgcttcgtctcgttgcttggcggccttacgcgcaattatgcggccaacccctacgacgtcatgcaccgcatcgccgaaaagaccggcatgccggcctacgtaatgccagtgcccttcttcgccaacaccgcggaggatcgcgaggtgcttttggcccagcgcggcgtcaaggaggtgatggatctcgccaataccgccacgctgaagctcgtcggtctcggcacggtcgatacgcatgcgcagctggtgcaatcggggatgatcgaggcgcgcgagatcaaggaagtggcggctgccggcggcgtcggcgaaatcctcggctacttcttcgattccaacggccgcatcctcgagacggcattgaccgagcgcacactttcggccgccttgccgcaaccgagaaccgagcggctagtggcgctcgccggtggggtggggaaggtggaggcgatccgcgccgtgcttcgcagcggtagcctgcatggcctgattaccgacgaaaacaccgccgaggcgcttctgcagtagcgccgcgacagattgaagacgagatggaataggattgcacatggcaaaatcaccgcgtttctggatcggcaccagctggaagatgaacaagacgcttgccgaggcgcaaagcttcgccagcgggctcaaaaatgcggatggcgcgcgcgatccgcgtatccagcgcttcgtcatcccgcccttcacggcggtgcgcgaggtcaagtcgatgcttgccgacacgtcggtcaaggtcggcgcgcagaacatgcactgggccgatgacggcgcatggaccggcgaggtgtcgcccgtcatgctcaaggactgcaatctcgacatcgtcgagctcggccattccgagcggcgggaattcttcggcgagaccgacgaaaccgtcggcctcaagaccgaggcggccgttcgtcatggtctggtcccgctcatctgcatcggcgagacgctggccgaccgcgaaagcggccgtgcggccgaggtgctggcgacggaagttcgcggcgctctctccaagctcaccggcgcgcagaaggatgccgaaatcctgctcgcctacgagccggtctgggcaatcggcgtcaacggcattccggcgacggccgaatatgccgatgcgcgccaggccgaaatcatcgccgttgccgagcaagtgctgggtcgccgcattccctgcctttacggcggctcggtcaatcccggaaattgcgaagaactcatctcgagcccacatatagacgggctcttcatcggccgatcggcctggaacgtcgagggctatctcgacatcctggcgaaatgcgccgccaaacttgacgcaaaactcgaaggagaaaaagcatgaaactggcaatcgcaggagacagcgcgggcgaaggtctcgccaaggttctcgccgaccatctgaaggatcgctacgaggtgtccgaggtctcgcgcacgagcgcgggcccggatgccttttacgcaagcctttcggatcgcgtggcgtcaggcgtgatcgacggcacctatgacaaggcgattctcgtttgcggcaccggcatcggcgtttgcatctccgccaacaaggtccccggcatccgcgccgcgctgacccatgacacgtactcggccgagcgcgccgcactgtcgaacaacgcccagatcatcaccatgggcgcgcgcgtcatcggacccgaactggccaaggccatcgccgatgcgttcctggcgcagaccttcgacgaaaacggccgttccgccggcaacgtcaaggcgatggacgaactcgacgcgaaatacaatcagcgctgattgttgtcggcgggcggtctgcgatcagcaggccgcctgcatttccggcatgtctccggacgcaaggctatctcgttggtccgactgatggtgatctgcggtgtcgatttcgccgcccgaaattcccgtccgatcaagcgtcgattgcgattctcggatgcctcttatgcaaatttatctctgctcattatcagggcaataagataaataattgggcattcaaaaaggagatatgcaatgaaaatcgccaacaggattgtcgaatacttccagctcggcaaggcataccgtgaactttcccgccttgacgacgcagctctcaaggacatcggtgttaaccgcgccgatctgaagcgtcgcgtatacggtcgctgatcacctcactacctgattgcttccgatgggcctgctcaagcgggcctttatcgtttctagggccttttctcagcaaaaaaacgagcgcgttcgatactgtgtatccgctctcgaaaatgcccggtcatcgaagccgctccctgccggctgaagcacccgcgttaaccttttgttaaccaaatcatcgttaataaatctcaacgatttcttaacgtagatgaccaaattgctaacagatgcccgctccatccgtatcaagggccgctcgtttctggcggtgatgctgtcgccggacctgccgctcgatgactggctggtgcggctggatgatctggccgcgcgttcggccggatttttcctcgggcgtcccgtcgtgctcgatatcagcgatctggagatcgatcgcgcgcaattgaaggagctgatcgcggcgctcggcgagcgcaatgtcagcatcatgggcatcgaaggcggccgtccttcgctcgtcggaccgggcatgccgccggcgctcaagggtgggcgtccggtttccgatttcgaaatgccgcagaacgagcctgttctcgaagcgccgcgcaagcctgacgcaatcgagacgcggcaaactccacagtcactggttatccgggagccggttcgctccgggcagtcggtgatattcgcggaaggcgacgtgacgatcatcggatcggtctcatcaggcgcggaggtcattgctggcggttcgatccatgtctacggcactttgcgcggacgagcgatggcgggatcgttgggcaatgcgtctgcgcgcatcttctgccgcaagctcgaggcggaactggttgccatcgatggcatctacaagatggcggaagacctggagccggggcttcgcggacaagcagtccagctctggctggaagacgacgcgatcaaggccgagaaacttagctgagcccaggttggccaggaattaggagagaaagatggggaaagtcatcgtcgtcacttcaggcaagggcggagttggaaagacaacctccaccgcggccctcggagcggctcttgcacaaagaaacgagaaggttgtcgttgtcgatttcgacgtcggacttcgtaacctcgatctggtgatgggcgccgagcgccgggtcgtctacgacctgatcaacgtcatccagggcgatgccaagctgtcgcaggcgctgatccgcgacaagcgtctcgaaacgctgtttctccttcccgcctcgcagacgcgcgacaaggacaatctgacggccgagggtgtcgagcgcgtcatggccgacctgaagcgtcacttcgactgggtcatctgcgatagccctgccggtatcgagcgcggcgcgacgcttgccatgcgccatgccgatgtcgccgtcgtcgtcaccaatcccgaggtctcgtcggttcgcgattcggaccgcatcatcggcctgctcgattcgaagacgctgaaggcggagcgcggcgagcgcatggagaagcacctgcttctcacccgctatgatgcgaaccgcgccgagcgcggcgacatgctcaaggtcgacgacgtgctggagattctctccattccgctgctcggcatcattcctgagagcatggacgtcctgcgcgcttccaacatcggcgccccggtcacgctcgccgacagcaagagcgcgcccgccatggcatacttcgacgccgcgcgccgactggccggcgaagaagtggcgatgacggtccccggcgagaagcgcggtatcttcggcaagatttttggaaggaaggccgcatgagcatttttcggctttttggaaaacagagaaccgcaccggctgcccgcgagcgcctgcaggtgctcctggctcacgagcggtcctcgaccggctctgatctgatttcggtcctccgcgaggaaatcctcgccgtcatcgccaagcatgtgcaggtcgacaacgaccgcgtgcacgtgaagatggaccgcgatgagcacatgtcgattctcgagatcgatgtcgagatcccgctgaacgcagcccgcgcagcctgagcgagaataggggaggcggcactcatggtgccgctcttccatggctagatcgccggctcagtctcggctcattggcaagctaccagttgttctttgccagttcccactcgccgtcggcaccgatttcgacgcgcttgttgccgcgatagaagaccggctttcccgacttcttgtcgatggcgaagcggctgggcgaaaacttcgccttttccttgccgtccaaggcaagcgtcagcgcttccttgaacttcccgtttttgcatagtgccatgaactgggcttcattcatcggagcactccttggtgacgcatgccgttgtttgaccgacatacgcggtcgcaatggttgagagctgtgacctactgcagacgcatggcatcccgcaagccgaatgtcaccttagcgtccgcctgcgatcatacgccgggccggcgatgaacggggcggatgtcttcgccccatcaccgctctgccgatgccctgtccctataagggcatgcgaggtggccctgatcaaccggccatcagcccggtcgcgcctcgcctccagtagccggcagccagcgtctggtcacgaccataggacagggtatcgcgccaatactcgcggatctctttggtggcctcgttttcggaggcaaaccagccgaagctcgagatgccctccggccattccaccgcacggatggcgcggaccagttcgccgtgctcgccgccgggaacgccgttgcggtggatccagcgaagctcgatacccttggggtgggtgatcggctgttcgtctgtcgcctgcgccacttcgacgaaggcgtggccgcgcgcatcgggcggcagtcgctcgaggatgcggctcagcgccggcaatccggtctcgtcgcatcccatgatgtaccagtccgcgggtctgaccgggcggccgagaggccccatgataccgacctgatcgccctccttggcatgcatggcccagttgcagccgacgccttcgtgcgagccatcgccatcgccgtgaacgacgaaatcgacgtcgacatagccagccttcgcatccatctcgcgaatggtgtagacacgcgcggccggcttgcgctcctccgacggccagaatgtcaggccgttcggtccggcgatcggccacaccggctcggggacatcggctgtcggaaaatacatgcggatgtgcatgctgctggggttgtcgaagcgctcgagattgctgcccgtcaggcgcacacgtcgcatgcccggcgtcacctgccaggcgcgctcgacgcgcatcaagcggaacgaagagagtgtcgtgtcgccggcgagatcgccagtccagacgaattgcggcttttcgctcttggcatagagttcgacggcgacgccgagaagctccttggcgcggcgaaggccctcttcatccgccgacgaggcttccatcgtcagccgctcgggcgtcatgtcgaagcgcgcggaagcgaaggggaattcgaaggttatgctatcatcggtctgcacgacggcggcatcgaagctcgccagccggtcgacgatcaggtgcaggtattcaggcagcttcagcagtctaatttcagcgctgcagcgcaatcgtgtgggttcggtcatcgggtatcacctcgggtaaacgaccggggaatggcaaaccatccccgatgggacatcggacaccccgatcccgcccgtggaatgatcccgaagctcgtgttgctgtcatcgcctgttgtatctgccctgaagtgcgcatgtaggcaacggtataggcgacgtctctccggttttctacacccatgccgatgttagacgcccgcaaacttggcaattcgcaaaaagacggctgaattcggccgatcgatcggtgatggcggctgccgtcgatggggcgcttcgtgcaaccaggcgtattcttgcgcggagcccgggatccctgctaaagccgcgtgcgacaggctgcatccggaaacgcgagaagacgatccatggcgacactgcgccaagttgctgaacgggcgggctgttccacggcgacggcgagccgcgttctgaaccacagcggaccggttagccccgcgatggtcggcaaggtccgcaaggcggcgggcgaactcggctatcgcgcttccggagcaactgccaggggcggccgaaggcccgtcatcggcgtgctcgtgcccagcctgaccaacccggtctttgccgcttccttgtccggtatccagaaccgcatgctgaccgcagggcatagcgtgctgatcgcgcagtccaactatgacccgctgcaggaagcggacgccgtgtccggcctgatgagcgaacgcccgaccggcttgatcctgaccgtctgcaacggcctgaacagccaggcgctgttcgcggatctgccgccgacggtgctcttgcacaatctgccgacggatcgctttccagccgccgtcaccgtcgataatttcgcggccggccgtgatctcacgcgctatctgctgcagatggggcacgagaggattttgttcgtctccggcagctttgtcgcgtccgatcgcgccgcgcgccgttaccgggggtatctcgaagcattgcgggaagccggaaagcagccgctcgacgcgatgcagatctcgttcgtgtcggagtatgatcagatagacatcctggcggcgatcagggacggtcgcccgaccgcgatcatcgggtcgaatgaccttttggcactgggcgtgatcgcggccttgcggcgcgagggactggcagttccccaagacatgtcggtggccgggttcgatgggatcgtcatcggcaagctgatcgatccgcctttgacgaccgtgaacatgcctgacgccagcatgggcacgaccgcggcgtcgctgctcctcgacattgccgaaaacgccgcgcccgagcggcatctcgaactcgcctactcgcttcacaagggcgggaccgttcgcgatctgaatcggccgtcccgataaaaaagccgccgcaccagggtgcgacggctcggtatgatcatcggctcgcgcttagctgcgcggcagcatgccttcgacgtcggcggctgcatcgtcgagcgcttccttcggcgctgccgactggtcgacgatgcgcgagaggttgtcgacgatcgtctgggtgacgcgaacgccgttggagcccgggaaggcataccatggaaccatcagcggcatctgcttcaggccggcctggaacagcgggttcttggcgtagaagtcgccgagataatcaggcgacttggcggcaagctcgttgttcggaacgtagcccgtgccgggtacgacaaccgaggcgccgtaaggcccggccgcgaacttggcgaacttccaggcggcttcctgcttggcggcgtccttggtgaggatgacgacggcgttgccgccggtcggcaggcgacccttggcggggtcgagcagcggcagcggcgcggtccgcagatcgaacttgtcgccgacattcttgatggtgttgcgcagcgcgccggtggtctggaactcgaagccgaccttgccggccgcgaatgcctgctctccagcggacttggtgaataccggcagaccgccttccttgaccatgcgctcgatcacttcgccggccttctggccttccggaccgttgaacgtcaccttgctttcgtcttcgctgagcatggtgccgccggcgccaaacagcagcgcggagaacatccagtcgtcgccctgccagcggaagtcgatgccatcgacgccgttgccgagcgccttgatcttggcgccgagcgcgatgacttcgtcccaggtcttcggcgggttctcggggtcgccaccggcggccttaacgagatcggcgttgtagtacatgatcggggtggaggtcgcgaacgcgaggccgatctgcttgcccttgacctgggcgagcttcaggatcgtgtcggagaagccctgggcggccatgtcgccgtccttctggacgagcgggccgagatcgacggcgacgtcgcgctcgtcgatcatgcgcaggcggttcaggccgatgaaggtcaggtccggcatttcggaggtgccgacctggcgaaggatcgtctgtatcccttcttcataggtcgcggacgggctggcgaactggatcttgatgtcggggttctcttccatgaacttcttcgagatcgtgtccatcacgtccttgaagaagcccggcatcggatagtggaccgtcagcgtcgtctcggcgaaagccggcacggttgtcgccatcgagatggccgccgcggcgagaagctgggtgatacgtttcatcgctcgttctcctgttgatgcgaccggtcagcctttgagaccggtcatggtgataccctcgacgaagcgcttctgcgcgagcaggaatgcggcgacgaggggaatggtaatgatcatggtggcggccatcagcgcgccgtagtcgtcaccggcctcggcggcgcggaagtacatcaggccgagaggcggcgtggcgtactcttgcctggtgatgacgacgaggggccagtagaggtcgttccagtgggccacgaccgaaaagatcgagaaggcggtgacggctggccaggcattcggcacgatcacacgcgccacaatgccaagctcggacatgccatccaggcgcgccgcatggatgaggtcatccggcatggcccggaagaactgcaggaacatgaaaatcgcgaagaccgagatcgagaacggagccaccagcgcggtatagctgttgagcagcgacaggctgttgaaaccgacatagagcggcaaggcggtcgcatggatcggcaccagcaggccgagcatgacgagaaccatcatcagccgcgccgcgcggaacttgagcttcgccatggcgtaggcgcacggaatggcaaccagcacctggaagaacaggatcatcgcgcagaccagaatgccgttcaggagcaaggtgcccatcggcacgcgggccagcgccttggtgaagttttcgatgtagtagaaattcgtagggatcagcgacagggcggaggtgaaaatttcactctgcgccttgcctgctgtcgacagcatgaagacatagggcgagaggaaaagcagggcgccgaaggaaagcagagccaggcgggtgacgcggcccagggtccaccggttggcgatcatcgtgttcgagctcatgaatagtgcacccggcggtcgagaacgttgtactggaggaaggtgagcaccatcaggatggcgatgaacaccacggtcatcgccgaggcgtaaccgacgcgcagatagacgaagccttcctggtagatgctgaaaagcagcacctcggatgcgcggttcggccccccttgggtcagggtctgaacggtttcgaagactttcaccgagttgatgatgctgatggtggtgacgaacagcgttgtcggtccgagcatcggccaggtgacaagccggaaccggtcgaatgccgagcgcgcgccatcgacctcggcagccgcgtaaagttcacgcggaattgcggtgaggcccgcgaggaaaagcaccatgttgaagcccaccgactgccagacgccgatgatcgacaggctgtagagcacggtgctcgacgcggccagccagttgggaccggggatgccgaccagcgccagcagactgttgatcggcccgattgtcgggtgaaagagatattgccacacggtcgccatggcgacgatcaacgacgccaccggcaggaagtagacggtgcggaagaagctgcgggccgtcctttcgccttcgatcagcagagcgaccacgaggccgagaacgatggagaccggcgcgacgatcgcggtataaaatgcagtgttccacagcgccttgcggaaagtgcggtcgctcatcaactccgcatagttctcgaagccgacaaagcgaaacttgcccatgccgagttcgaagttggtgaagccgagcagcgcgacggcgacgatcggcagaatcacgaaaacaaagatcaggatgatggccggcagcgcgagaagccaggccatgcgctcttcgttgcgttcgcgcgcagccgcggtcttgcgggcggcgggtgcgccaatggcgatgctagccatgagccttctccagcgtcgcgtcgatcgtaagcgggcttgcgcgcaggcggctgccatcctcggcgaagaccagggccttgtccggcgacagcgagagggcaacgggcattccagccgaaatgccgccggcgtccgccggcgaaagcttcgcgatcatcatctcgccgatcgcatcgagcttgcagtagagaatgacctccgagccgaggaactcgatacgctcgaccttcgccgcgaggccgtcctgacggctgtccgccagacgcacgaattcggggcggatcgccaggctcaccggcgtacgggccggaacggaagtatgcaggccgagcctgatgccgccaaaggacaccacgccgctctcggcgagcgccggcaccacattgatgcgcggctggcctacgaaacgggcgacttcgacgtgagcggggtcgtcgtaaatgacctgcgggctcgccagttggagaagattgccgccgatcatcaccgccatgcggtcggccatcgacagggcctcggcctgatcgtgggtgacgtagacggtcggcaccccggcgcgccggtgcagctcgacgatctcgccgcgggcgtggacacgcaggttcgcatcgaggttggaaagcggctcgtccatcaggaacacgctcggatggcgcaccatggcgcgcgccagggcgacacgctggcgctggccgcccgacatctggccgggcttgcggtccagcagatgatcgatcttcagcgacttcgccatttcggtgacatcacgcgcgatggccgcggtgatcgcgcgctggcccggcagcaaggggccgatgaacgggaagcgctgcgcgccggagagacggcgcatggcgagcggaacggcgatgttctggctggccgtcagatggggataaagcgcgtaggactggaagaccattgcgacattgcggtcagcggccgcgatggcggacatgtcctcgctgccgatgatgatctcgccctcgtccgcgtgatcgaggccggcgaggatgcgcagcagcgtgctcttgccgcagcccgacgggccgacgagcgcaatgaactcgcccggctcgacgtcgaggctgacgcccttgagaatggcgttgccggagaaggatttggtgatgccgcgaagggaaagcgcgctcattccgcctgctcccgctgcttcttcggcgttgcccgcggatagacttcctccaagacctcgtcgaggaagtaggcggtcatgcccggcacggccaccagttcggtcctgacgtcgtcaccaagttcgtgcacggccgcgccgacaagacgctcgcccggcatttcgcgttccatctcgcccaggatgaaggccgccggaggcgcccacacgacggatgtctgaccgaacgcgcccttccacgtccagtgcaggtggccgctgccgaagagcgcgacgtcgtgggcggcgatcaggtcgtagagccggcggcgctgcgtcgggcgcacgctccagtagccggtatcgccttcattggcgtcgtccacgaacagcggtttgtgagcgaagatggcgacgcggcgctcgccccgctcggcgagcgtcttctgcaaccaatcgaactgcgcctgttcttccgcatcctcgaagcccatcagcaggctgttgagaccgatgatgcgccactcgccgatgtctttcgcccaatagtcgggaccgacgagattgcgccagcgcgccagacgctccggattgaccggctgagccgaaccggggaggtgaccgacgtcgtggttaccgggaacgatcagcatcgggatcgagacttcgcgcatcagatccatggagaagaccagatcctcgtccttgtccgcgccgtcaatgctaaggtcacccgtgtggacgatgagatcagcgccggtctcttcgatccagcgggccaacggcgcccagttgccgttgaaatgcggcttgttggggctgagatgtgtatcggtgatgtggatgatcttcacggcgcttctccagttccaaggcgccgaccgaactcaggccgtcgacttcttccggcgcctctttagagccatcatgtgtcgtgggcgtaacacggctttccaaccgcgtttcattttcgtcatcgaattgtcaccgcatatccgggcggcattcagccctcttgattgcagctgaaatggagccacgatcatccattcgatgcagacgaccgcgataacgcgcggaccgtcatctaactgtaaaggaaacattctaactagctcctggacagattgcacagctgtgcaacgggagtttgaagatgagccaacgagcgtttctggaattgcggtcggttgcctgcagatatggcaacacccaggttctggaggacatagacctgaatatcgagcgtggcgagttcgtcgccttgctcgggtcttccggttgcggaaagacgacgctgctgcgtgttctcgcgggcttcgtaacgccgtcctcgggctcggtttccgtacgccaccgcgaggtgacgcacctgccgcccgacaagcgcggcatggcgctcgttttccagtcctacgcgctgtggccgcacatgaccgtggcccagaacatcggctacggcttgaaactgaagaaggtgcagcggagcgaaatcgacagccgcgtcgccgccatgcagtcacttctcgggctggatgggcttggagcaagaaagccggcggccttgtccggcggccagcgccagcgcgtcgcgctgggccgcgcgctggcggtcgatcctgagatcctgctgctcgacgagccgctttccaatctcgacgcacgcatcaggctcagcgtccgacacgagttgcgcgccttgcagaagcgcctcggcattaccgccgttcacgtgacgcatgatcgcgaagaggcgatggtgatggccgacaggatcgtgatcctgaatgcaggccggatcgcgcagcagggcacgccagaggacgtctacaaccggccggcctcggccttcgtcgcggcgttcatgggcgccgagaacgtgatctcgctgaacggcgcgccgcaggacagcgattttctcatcgaggctgggccctcgaatgccgcgggccgcgtggcactgatggggcgaggtctcgcgcagggcatcgtcgaggcgcgcttccggccggaagcggctcagatccaccccgccgagaccgccgtcgtcggcccgggcgtcacactcgagggcgagatcgcggccgtcagctaccccggtggtcactggcgccatgccgttcatgtcggtgatcgcgaaatcatggccgacgcgacccgcgccttcgagccgggcgagcgcgtccgggtacatgtccccgccgacgccctgtttcttttcaattcgccgggctcgcagccggcaaacgccatttcccgggtttcgcccgggaaagtccacgcctgacccttttgattgcctgacttttagaacctcaccttttcataacaaggagaagcctgatgcagagattgacgtatgccgctatcgccattgctctcgcgacgttgccggtaaaggccgcagagctgacggtcgccaccgccggcgaccagaacatggtcgattacatcaaccagtatctcggaccgttgttcgagaaggccaatccgggcgacaccgttcgcgcggtcggcaccggccccggtgatgcgggctcgcagaagatcctcgagcgcttcgacgcgcaggccgcggccgacagcaaggtctgggacgtcgacgttgccgtggtgcacgaaaagttcgcgggcccaatggttcagaagggctacctcgagaagtatcgcggcaacatcgaaaccggcaagctcgtgacccgcggcaatgcgaagaacgcgctcggctcggatgtcgatggctacgtgatgccgatgttcaacagccagacggcgatcgcctacaatccggcgctggttccgaacccgccgaagagctacgccgaactcgccgaatgggcaaaggccaatccgaagcagttcggctacaacggcatcaagggcggcgcgtcaggcgtgagcttcgtcatgggctgggtctatgccttcggcggcggcgatgccaacaacctgatgacgggtccgttcaagcaggacgagaccacgaagtgggatggcgctttcaagagcctcgccgacttcaccaagaacgccacgctgacgcctggcaacgccggcacgctcgaccttctcagccgcggcgaaatcgccatgggcccagtctgggtcgacatgttctacagctggcaggccaatggccagctgccgccggaaatgaagctggtgctgcccgcacctggcatgcccggccagccgatgcactatgtcgttcctcagaagtcgggcaacaaggcgcttgccgagaagttcatcgcgctcgcgaccagcccggaagtgcaggccgaaggcatcgtcaagcgcttcaactggtatccgggtatcgacgccaacttcgtcaagccgaagctcgacgaggcgacctggaacaagctgttcgtcgatatcacgcctgaagacctcgccaacaacggcaagcctttcccgatcgcgccctacaacaccgcgatcctcgaagcctacgaaaagtccgtaaagtaatcctgcgtgccgccttctcctcccgggggaggcggttcgacgtgctggatgagaggtagcacacggtgtcgccgtcgttcgctcggaggcgccggtctctgtcaccgttatctctcatccgcctcgctcgcgcttcaaggtcatgaaatgtcgaaacgcttactcggtctcctgctcgtcctgcccgcgctggcggtcatcgcggcgctgttcattcttccgctgatcatgtcggcggtgggcgccttcagggtggagggcggcgccttcggcctcgacaatttcgccaagaccttcgatctctataccaaggatatcatcttcactgtcgtcatcgtcagtctctcgacggtgctgatcggcatcggcgctgtcgcgattggcggttatctgacgctcggcgagaatcccaaggccgtcgcgatcctgcgttggctctatcgctggccgatgttcattccattcatcgtcgtcggccagatcctgcgcaccttcctttcgaagaacggaatgatgaacaataccgccgtaagcctgggtctgatcacaccgctcgatgccgtcagtttcctcgactggcgcggcatcgtcatcgccttcgtctggaagcagacgccgttcgtggcgttgctcgtcgccggcgcgatggcctccatcaaccgcgatacgatcgaggccgcccgcaatctcggcgcctcgaaattgcggctgctgttcgagatcatcgtgccgcaggtcgccgtcacgctcaccgtcggcctcattctctcctttgtcaccatgatgtcggtgctttcggtgcccttgatgatcaatgcgcaatcaccaacgatgcttaccgccgacatcgccttccgtgtcaacgcctatggcgattatggcgtcgccaatgcgcttggattggtatccctggtgctggcgtcttccgtggcatggatctatctccgccaaagcctcaaggagcgcgcatgatgacgacggcttcttcttcgcgatcgcttctcgccgcgctgtggtgggtaccgcgcggcatcgtcttcggactgatggccttcttcatcttcggcccgctcgccaatcttgttttgtggacggtcgccgagaaatggtactttccctatagcctgcctttggaatacggcttcagctcatgggccaaggtcttcgcgccgcggggcggtgcgctggattcgttgcgcaactcgctcgttgtcgccgtcttgacggtgatcgtctctctcatcctcgccattccggcgggatatgcgctggcgcggctcaagctgccgctgcgaagcgccatcctgcttgccttcctcattccgcaagccttcccgaacctcacggtctacgtgaacgtggcgcgcatcttctacgagatcggcctcaatggcacgatcccgggcgtggttctggtgcacgtctcgcatgggctcgtctatgcggtctggatcgccaccgcggctttctcggcgatcgataccgagctggagcaggccgcgcgcgtgaccggggcgggggcgttgagagccttcttcgatatcacgctgccactggccgctcccggcctgatggcaagcgcgatcttcgtctttctggaaagcctcgacgaattcaccggcagctacttcgtcggcgcgcctgatgtgaacatgctgccgctgttgctctatacgacggcctccggcggcaactatcagatcgcctcgatcacggcgctgctgctgctgatcccgtcgctcgtcttcatgctgatcgtcgaacggttcctgaaagcagacgtgctctcgcgcgtcggccactgaggcgcatgcgctcggcggcggctacgctttcgccgccgagattgcaggaacgatcttgtggacgtcgtctccgacgaagacgatgacatagccgccatcatctgcagccgcggtcgcccatgatccgagctgggcggcgtacggttcctcgcgccacgacagcggatgatcgggatcgacgagcaccgtcagctgcttgccctggccatagaccatcatcttggcgaccgtcgggtcccattccgcaccgagctcatcgtctgtcatccacgcgcagagaaagtcccggcatagatccgggcggtcgtcgtagatgcgacagccctgtcccgtcacgcaattcacgcaaggtgcgttcgcgggcttcgaaagcagctcgatctcgggcagccggcagcacaaagtgcaggcgccgcaggagcgggtctccataccggatgtggccattcctatcatcgtacgcagcaagggtttggaggttcgtgggtcatgtctcgctcgcttccgcagtgccgggtttcggcgcgatcgtcacctgcgcgccataggcctcgcgcatgtcactttcctcgcccggctgacgatcggcggcgtggtgaagcagtcttgatgcgtatcccgccgcgtccgatccctcgatcagggtgacgtcggcattgccgggattataggagcgctcgaaccaatcgacgggttgctgcaggaagttcatctcgaatgcccgattggtgacgccatggccgacgatgatgacgttgtcgctgccgtcgcgcgtgccgtgcagcgttgtttggagaaacaggcgcattctttgcgcgacatcggcgcggctctcgccatccggcggtcgtgcatagaactttccgctgttgttgcgcagccttgcccatttctcgaattcgtcgggaaacttctgccgctgttccgcgtggtcgtagatctcggtgaagaggccgaaatcctgctcacgcaacagatagtcttccctgaccttgccgatcaggtgccgcggcagaacggcaagtagtgcatccttggtctggcgcgttctcaagaatggcgagtaccagatatgaagctgaacgctggcgtcgtccaacgtatcgagatagcacgcaatcgcgtcggccgcgccgatagcctgctggtgtccccatcgcgtcaagggaacattgtgatcgccgaactggccgtaggcccgctcatcgagattgccgagggattcgccgtggcgaacgagaaagatgcgcatcatgcggcccggattgtccgaaatggaatcgccatatcatgaacgctgcgcctgccgggggcaacggcgggcacgcggtgtccgcgcggggcctatccccgctggcgtagctcgcttcgcaacacgtaaaccagaaggccggccagcatcgcggccagcgcgaaccaggtgagcgcatattggaggtggttgttcgggaaactcacctgcgtcagtccgccgaccggaaggccgcccggattggcggtcgcgtcggcgtcgatgaaatagggggcgatgtcggccacgccacgctttgccgccatcgcgtccacgtcgcgggagtaccagcggtcgtttgccgggtcgttcgacctgatgaaggtgccgcccggctcgttgaggcgaagcaatccggtaatcttgatggggccggaaatccggccgtcgctgcgggagttcacgtcgcgtttgttcgtcggcacgaagccccggttgatcatgacggacgtgccgtcggcaagcgtcaagggcgcgatcacccaatatccggcgccgagctccgttgccgaatagacaaggctttccttgtcgctttgcaaggtgccctcggcggtcacacggcgatattcgtcgttttctttcgtgatgccttcccactcagcacgggccggagccgcggtgggttctgcattgatgcgctgatcgatgcgagcgatcaggtccaatttccaggcgcggcgttcgagctgccagacgccaagcgcgaaaaccgcgcacatgacgacgaagagcaggccgcagaagatcgtcaatgcgatcgtggaacgatgtttgggagcttgttctgctgtagattccgtcaatgtctcataccgtaacgggcggcgttgtcgccgcccgactattgtgccgttcagggcatgcttttcatcatttccgggctcatgggcatcatgtttgtgttcagatgatgcatgacccacatggagccggagagagcgatcactacgaggagaagcgtgaagatcagagccatcagggtccagccgccctcggagcgtgcgttcatatggaggaagaaaatcatgtgcacgacgatctgtatcacgccgaagcccataaccaaagccgccgtgacggctttgctgtcgaatacacctgccatgaccagccagaacggaatggcggtcaggatcaccgacaggatgaagccgatcatgtagctcttgaaggagccgtgcgcggcctcgtgcccatggctgtgcccatgatgggcttcgtgagcatcctcgtgtgttggggcgtgcgaactcatccgagaactcccataagataaacgatcgaaaatacgccgatccagacgacgtcaaggaagtgccagaacatcgaaaggcacatcaggcgacgccggttttcggtggtcaggccgtgcatggaaacctgcaccatcagcgtaaccagccagatgatgccgaaggtgacgtgcaggccgtgcgtgccgacaagcgtgaagaaagccgacaggaacgcgctgcggctcgggcccgcaccctcatggatgaggttcgcgaactcatagagctcaagcccgatgaacaccgcgcccaggaggccggtgacaccgagccagaacagcgtctctgccttcttggcccgttccatctgcagcatggcaaagccataggtgatggacgacagcagcagcatggacgtgttcacggccacgagcggcagttcgaacaagtccgcgggcgagggaccggccgcgtagttgcggccgagaacggcgtaggttgcaaacaggatcgcgaagatcaggcagtcgctcatcaggtagagccagaaacccagcatggtgctgttttccgggtggtgctcttccttcatgtagaattctggcttttcagccatgtcgattgcagtgttgctcatggtcttatgcctgtccggcaagcagcttggtgcgcttgtcttccgtttccacgacttcctctacggggatgtagaagtcacgcttgtagttgaaggtatgaccgatgctgacgacgagcagcgcaaccgcggaaaccgcgacgagccaccagatgtaccagatcatcgcgaaaccgaagaccacgctgagcgcgccgaggatgacgccggtgccggtgttcttcggcatgtggatcggctggaagccttccgtcggacgatcgtggccgcgggccttcatgtcgtaccaggagtcgtgatcgtagacgatcggcgtcttcgcgaagttgtagctcggcggcggcgacgaggtcgaccattcgagcgtgcgtccaccccacggatcgccggtggtgtcacgcagctggtcgcgcttcacataagtcatgacgagctgcatcaggaacgagccgatgccaagcgcgatcaggaacgcgccgaacgcggcgatgatgaaccagatctgcagcgacggatcgtcgaactgcgacatgcggcgggtgacgcccatcaggccgagaacgtagagcggcatgaaggcgaagtagaaaccgatcagccagaaccagaaggacatcttgccccagaacggatcgagcttgtagccgaaggctttcgggaaccagtagttgacgcccgccatcaggccgaacaccacgccgccaatgatgacgttgtggaagtgtgcgatcaggaacagcgagttgtgcagcacgaagtcggccggggggatagccagcatgacgccggtcatgccgccgatgacgaaggtgatcatgaatccgatcgtccacagcatgggcacttcgtagcggatgcggccgcggtacatcgtgaacagccagttgaacatcttcgcccctgtcgggatggaaatgatcatcgtggtgattccgaagaacgagttgacgcttgcgccggaacccatggtgaagaagtggtgcagccagacgaggtaggacaggatggtgatgaccacggtcgcgtagaccatcgaggcatagccgaacaggcgcttgccgctgaaggtcgcgactacctcggaaaagatgccgaaagcgggcagcacgaggatgtagacttccgggtgaccccaaatccagatgaggttcacatacatcatcgggttgccaccaaggtcgttggtgaagaagttggtgccggcgtaacggtcgagcgacagaagcgcgagcgttgccgtcaggatcgggaagctggcgacgatcagcacgttggtgcagagcgaggtccaggtgaagacgggcatcttcatcatcgtcatgccgggcgagcgcatcttcacgatggtcgcgatcagattgatccccgacaacgtcgttccgataccggcgacctgcaggccccatatgtaatagtcgacgccgacgccggggctgtactcgatacccgagagcggcgggtaggccagccagcccgtacgggcaaactcaccgacgaacagcgaaatcatgatcaggatcgcgccgccagccgtcatccagaacgagaagttgttcaggaaggggaaggagacgtcgcgcgcgccgatctgcaagggaaccacgaggttcatcaggccggtgacgaacggcatggccatgaagaagatcatgatgatgccgtgggccgtgaaaatctggtcgtagtgggacggcgggaaaacgccgggattgccgttgaaggcaattgcctgctgcgtgcgcatcatcagcgcgtcggcaaacccgcgcagaagcatgatcagggcaagaacgacatacatgatgccgatcttcttgtgatcgacgctcgtgaaccattctttccagaggtaggtccagagcttgaaataggtgataagaccgaggaccgcgatcccgccgagcacgaccgcgccgaatgtcgcgacgagaatcggctcgtggtagggaatggcctcgatcgtcaaccgtccgaagatcaacttcattaggtcaggattggaaaacatggaataacccgttcattggtgtcttttgggggcaaagcacctagcttgaactattcgctaggtgtggacgtgctggtaccgggtgccggcttggtctggctgtcatgctgcatggtggtgccggacatgttttccatcccgggcatattttccatgccgggcatgttctccatgctgctggcgtcgttggccggcgcatcgcttgcgctgaccggtgtcggcggggcagcgccatcgagcggcacgccttcgaacttcaatttgtcgcggttctcgaggctttccttgccggcgccgcccatcatgtcgatgtgcatcatttcgctcatgcacatcttgcccggcgtcgcgcacatgttcaggatcgcgctatagagatccttgtccgtggtcgcgtagtaacgaaccggctcgcgctcgcttggacgctcgagcttgagataggtgtcgcgattgagcgtggtgccgacgttcttgacctgagccacccagctgtcgaagccctgccggtccatgccgcggaacttgaagcgcatgttggagaagccggcgccgctgtagttcgcggaaaagccgtcgtaggcaccttccttgttgatgaccgcatgcagcttggtttgcatgcctggcatcgcatagatctgtccggcgagcgcggggatgtagaacgagttcatcacggacgaggcggtgatctcgaagttgatcggaacatcgatgggggcagccagttcattgacggtggcaatcccgagatcgggatagaagaagagccatttccaatccagcgcgacgacctggaccctgaggggcttggtgtcgccgggtatcgtgcgttccgcatcgatgcggtcgagcgggcggtaaggatcgagcttgtgcgtggtgatccaggtgatcgcgccaagcacgatgatgatggcgagcggagcggaccagatgaccacttcgagacgcgtggaatgatgccattccggatcatacgtggcggaggcgttcgactggcggtagcgccaggcgaagaacagcgtcaggaacatcaccgggatgatgatcaacagcatcagcaggaccgatacgatgatcaggtcacgttgttgcatggcgatgtcgcccgagggcgacatgaccaccagattgcatcctgcgagcatgaaaaatagcggcagaatgacgaggtggcgggaaaactttgacagcttttgcacgtcgttattgctctttttgtttcgtcacatccgcgactaaagcacacaaacgtaaagtaacatgaggtttttggtcgcagtgcagcagaattgcggcgctgcgggatacgacggcccacatgcgatgtcaaaagttggtgcgacgaagagacgcatttaatgcgccgcgccaaattcctagccgacgcggcgtcgcattcgtgcaactatatatcctcgaaaggccgctcggccaccgttcacgaccttattttagcgctctcacgcacgattctgcaggccgctcgaattttcgaaggtcgtgataaactatttctgcattccgcccttgataagcacgccagttagttcaaactcttacgtgaggcgctttgccgcagcgccttaacgagggaggcgttttgaatatggctaatgcgactaactatggtccttcgtccacgtctatggagcgtgacgcgagacaaattcatgctgacaagccggtgtcgccgaacagcattgcaatcggtgtcgtcattggacggacatccgaatttttcgatttcttcgtctacgggctagcgtcggtgctggtctttccgcagcttgtctttccgttcgcgccagacaggctgacggccactctttattcgttcgcgatcttttcgcttgcattcatggcacgtcccgtcggctcggtggtcttcatgactatcgaccggctatacggccgcggcaccaagcttaccatcgccctgtttctgttggggggatccaccgcatccattgcgtttctaccgggctacaacgagatcggcgtctggtcgatcgcgcttttggcacttttccgactggggcagggattcgctctcggcggggcatgggacggcctggcttcactgctggcgttgaacgcgccgcagagccagcgtggatggtacgcgatgatcccgcagctgggtgcgccgatcggcttcgcgctggcaagcctgctgttcggctatttcgtcgccaacctttcgtccgaggacttcctcagctggggctggcgttacccgttcttcgtcgccttcgccatcaacgtcgtcgcgctcttcgcgcgcctgcgcctcgtcatgacgaaggaattcggcacggcgctggaacagcatgagctcgaggccgcgcctatccgcgacgtcgtgcgcattcacggtcgcgacatcctgatcggcgctttcgtgccgctggcgagcttcgcgatgttccacctcgtgacgatctttccgcttggttggatgagcctttacggcaatcagccgatcggcgctttcatgctggtgcagacggtcggcgccatggtcggggttctggccatcgtcgcctccggcttgatggctgaccgtatcggccggcgcggacagctggcggtttgcgcggtgctgatcgcgatcttcagcttcgtcggcccgatcatgctcggctcgggttcgaacgggcacgatgccttcgtgatcatcggcttcggcgtcctcggcctgtccttcggccaggccacgggctcgatctcgtcgcgcttcggccgcggataccgctacaccggcgcggcgtttacgtccgatctggcctggctcgtcggcgccggctttgcgccgctcgtcgcgctcagcctgtccagccgcttcggtctgacctttgttggctactacctgctgtcaggcgcgatctgcacgctggcggcgctggccttcagccgggcgctcgagcagcgcgactgactgatcgcccaataagaaaagcccgcctgaactgatgttcgggcgggcttgttgcgtttatctacacggcgctgcggggacgcttagagcctttcctggttagattgaagcattctgccggagcaggttttcgtcagggcaaaggcgattggcgaagggcataccccaggtacggtcgagccgatcgcctttgatcctggcggaaagatgcccggccccagccggtttgcgaagcaaaccagcggggttggctgaaacgggccgcctgatcgtccggccggcttggccgtatgcgtgggctacgacgcgcgcctgccggacgaccatccgactccgtttgagccaacagaatgcttcaatctaaccaggaaaggctctaattcaccggttccggcttttttgccgcgcgcgcggcggtcagttcggcggtcgtgtggttcaggcggtctgcgagaacacgcatgatctcgaccgccatctctggaaaatcactcagcaacttcaggaaatgctccttgctgatccggagcacttcgagcgccgaggtggcgcgaacggttgcggtacgggacacgtcgcagaggatcgcgatctcaccgacgatggaattgggatcgacatcggcaaccttgatgtcgccggcaggcgagcgaacaagaatgtcggccgtacccgagaggaccacataggctgcatcgcccgggtctccctgtcggaacaggtcctgacctgcgttgtatgtcatgcggtccgaggtgaaggccaaaagcttgagcttggccggtgctatccgtgaaaagatcggcactcgccgcagcatctcgacttcgtctctaagcagcatgagcttattttctccctgcgcgcccatggcgcgcttgctagaatgacgcgcgtccttttggcaggacgtcgcttttgtagcccctgtagaatattacgataacagttccttgaacataccgttctgttcggaaagttccggaaaattaccggcttcgaccaggcttccgcggtcgaaaagcaggattcggtcgaaaagcgcggccagtctggcgttcgagagaacccacacgatcgccgggcgctcgccctcgtgatgcaggtcgttgacgagattgttggtgatctggtcctgcacccgctgatccagcgccgacagcggccggttgagaatgatgtagtcggaacgcctcagcagcgttcgcgcgaggttcagtttctggcgctgaaccatcgtcagccgcttcccgccggagcccacgtcgaactcgagcccgatcgaaagcacatcgtcgaaaagatcgagagaatcgaagaggccgaccatgagcgatcggatgccttcggaagcgtcggcgcgctggtaggcgatacggccgaacaagacgttgtccatcaggcttgccgacgaaatgaagtgctcgggatcgtagcgctcgatgaccgccgagagatcatcgggaatgttttcgtggaactgcttgcgcgcgctgacgatcttggccgtcagctcgtcggtgaggagaccgaagcggtggcggggttcgatgtaggcgaagctcagccgaatgatggccgaacggtcttccggcgtggcgtcgtcgaatttccggctgctgagcttctgcagcagagcttgataggtcggaatgtcgtccgccgtcatgaaggtcagctgctggaagaacggatggtccggcggcaggtcgtggaagagttcgaccgcgttctcggcgatctccaggcccatggcgtagagatcgttgctcaatcccgtttctcggaagagtgcttgaaaatagggatgggcggctaagcgccggttgttcatgatcggccgcttcatggagccgaaaagcaggttctcgcccaccgttgcctgggcgttgtagctgtcgaagtcgaacggaacgacgatgtcgcccagttccgactgctgcattttctcacgcagggcggcccggaggtcgacgatatgctcggcaagcttggtgtggatctgcgtatccaccgtcgagcgaagcgcgaggtcgagaatatcctcggtgatcagcacggcgtcgagaaccgggcgcatggccgtcaggatatcggctggaccggtggcgccggcagcgcggtaatccacccagtcgctgtttggatcgagcgtcggattgccggcctttatcgcttcggcggcatgccacttcgcttcctgcgccgtctgctcgtcgtaatcgggctcggtcagaggcgcgtgtttcagaccgtaaagaaggttgtcgcgcagcgtcccttggaaaaaatagagatccgaagaggcataggagatcctgcggccggaaaccgattccggcagttccagcagatccttcccgtcgatggtgatgcgaccagagtttgcccagaccacgcggccgagcgcttcggcgaatgcctccgcgccgctcgaattggggccgacgacggcgaccgtctcgttcggcttgatttcgaccgagacgtggtcgatcagcttggcgccactgtcgtcgctgacggccagattggtgacgatgatgggagccgccaacatggcgacatcgtccatggcaaccttgtgaatgctgtcgtcgatcagcggctcgacgttgaactgctcgtagacctgctggtatttgacctgcacgtcctggcgcatctggtcccagtcgatgagttccttcagcggccccggcaggtccttgtaggcgctgatgacggccacgagctgcccgatatccaggcgaccctgtagcgccagatagccaccgatcgcgtagaacaggaacggcgtcacctgcgcgaggaaattgttgagaaacttgaccaggaatttccactgatagagatcgtagcggatcgagaagatcagccccagccgggcggcgatgtcggcccgttcgaggttcgacgtgtcgttgccatggatcgtgccgatgccatcgacgatttcgccgacacggccggaaagttcgcgtgccgtcaactggcgctggcgaccgagttccagcagccgcttgcgcatgcgggggatgacgatcgcctgaaccccgacgatcgcggcggcgatcattcccagccagaagttctgcacgatgatgaaggcaagcgccgtcagcgcctggccgccgaggagcgcgggcgagacgaaagcatcgcccgtgaagccgcccatgggctcgacttcgtccttgatcatggtggcgatttcggcggacttcacacgcttgaagtgattgggcgggaagcgcagaacccggtcgatcagctgaaagcggatgcgccgcagcatgcgctcgccgagccggcccttgtaggtgttgatgtagaacttgaagagaccgttgaggacgacaagcgccaggaaaaccaggctgagcgccatcagcatctgctcgcggccgagctggaggccctggaagatctccacttttccgatcaacggaaacgtgtaggaaagctccataaaggtctgtgtcgcaccctcaccctcgaagccggagccctgaataggtccattgacgatctgcttcggcaggtcgaacgacaggaagtagggcaccatcgaaaatgcgacgaccgccagaatccaaagctgctgcagccgcgtgttcgaccagatgtagcgcgcgaggcttttttccattgctaaccgtcgattgtctggaaaatgtgagacatcaatcctgcacgagagggcggtggtaccgagaacaggatcatgctaccggatcgctcaacaaaaacaacgcgaagcggcgtgcattgctggatgccgattctcgcgggagtctgttttatatcacatgattttcataaagcgcgagagtttcacgcgagcatggcgcgaatgatttccgttgttcgtcttgcgccctcaaggtcgatatcgagctcggcggtggttcgctttggagccgcgagcgccgcgctcaccgtcgccgccacatgatccgccgtcaagcctttctcgggcagcagttcagcgaggcccagcttggcaaggcgctcggccctgacggtctgttccgtctctccaccggccacgaacgggatcaggatcggccggcaatcggtccgcagcaggtcgcccaccgtgttgtatcccgcctgcgaaatggacacgcgcgcggcgccgagaagcgacgggaaatccttgcggaaccggacgagcgtgacgttcggtggtatcgcctgcgacagggtctcgaaatccacctccggcaggttcgggccgctgatcagcaaccagcgcaggtcagccggcagcatcttcgcggcctgggcggcggcatcaagcagctccattccaaccgcgccgccaccggcggatgcaatgatgtcgaatgtctccgacgcctgctcgggcggtggtggcgccacgatcccggtataggtgatcttgtcggcgatatcgtgtgtcagcgggaatgtgtcctcgaggcgcacgaaaccagggtcgccgtgaacaagaacgctgtcgaaatgcgcctgcacgaggcccacggtttcggcgtcgcggccggccttgcggttttcctgcaatatgtcgcgtaccgaactcaacagtttcggtcgcgggttcgaaccttcgatcgcttcgatgagaggcagaagttcgaagcgcatctgcctgcgcccgaaaggaaacgcctcgataatgacgacgtccggccgcgtgtcgtgaaacgcccgcagcaagagatcgcggcgtcgatcgagaaaatcctggtcgaccgcaacaccgcgttcgtcggcaaggcctgaaaagccggcgttgcttgccaccacgggcggcaacgcaaccgtcttcaaccccgccgccgggaagcccgcgacaggcaggcctccggtcacgacagtgacgtcaaatccatcgttctgcagggcattggcaatgcggctcgcgcgcgcgatgtggccgatgccgagcagatgctgaacgtagaagaaaacacgcggagcgctcatgatgccttctgccactcctgttggaacagctggctgagctggtcgatgctggcgttgtagtcgaaatggctgcgtacgcgcatttcggcggcgtctcccagcctccgccgcaagccgggatcgcgaatggccgtctccagcgccttcgccagggccttcggatcatcgggctcgaccagaaggccgttttcaccgtccaccagcagctccggaacgccggacacggaggtggagatgcaggggaggcgctggctcgatgcctcgaccagaacgttcggcaacccgtcgcgatcgccattggcggcgatgcggcaggcgagcgcgaagagatcggcgcggcggtagtgatccaggacctcttcctgggcgagcgcgcctttccagatgatgcgctcggagagtttgagctcggctgccagtgctttcagcttcgcaagctcgtcaccgccgccgatatgctcgaaacgccagtgcagatcgccgggcaggagcgccagcgcacgcagcaaggtgtcgtaacccttcttctcgaccgcccgcccgacactgagaaggaaaacgggtttcgtgggatcgctgccatcctctgcggatcgctcgccggggaaatggccgaagcgcgcgaggtcgaggccgtgatagctgagatgcacggcgtccttgcgcgatgtcagtgtgcgcatgtgctggtagccgttgcgggtgcaggtgacggcccaccgggcactggaaagcttttccgtcagctcccagtcgggcgatgtccagatgtccttggcatgtgccgagcaggtccagggcacgccggtcaaaaggctcgtatattcggtgacggaggcgggcgtgtggatgaagtgcgcgtgcagccactggccgccatccggccattcgcgcgcgagcaccatcgcctggccaagcctgcggaagcgattgcgcgagacgtcgcgcggcaagtccttgaaaaagcgcttgatcagcgcgccgaagccggattttcggaagcttgagaacagccccttcagtacccgcaacggctcctcgtgcagatattccggcagatagacgacccgcgccttgatctcgtcatggacgggatggcgcttcttgtcggtcgggcgacgcatcgagatcagggtcaggtcgaacccggccttctccagaccgagcaattcctgcgctatgaatgtttccgaaaggcgtgggtagcccttcaagacgactagcagtttccggcgtggcggcaatgatacgactttcactcggcgccgacgacggagaggtggcgtccacggttgtcgagccagctgccgactgtctcggagatatggttcaggccttcaagccgcatgttggagccactcatcgagggcggctggcggtgcggcaggcgcttcagcgcgtcggccattaccgtcgcgtcggccgatgcttccggcaggagcatctcgacaaggccgagttcgctggcacgccgcgcgcgcaggagttgctcctcgcgcggtttgacacgcggcacgatcagcgcgggtttgtcgaaagagaggatttcgcaataggtgttgtagccacccatcgccaccacgcccgaagcgccggcgatcagctcctccatgttgttatcgaattcgataacctggatgtaggggatcttggcgcccttctggaccagcgcggtgcgctcggcgaccggcatgtaggggccgagcacgacgagcgccttctgctgcaacgtcgggtcctgctcgtaggcattcatcacgtcgtgcaccagatcggagccgtcgccgccgccaccggtcgtgacgaggatatagtcgtcatttcgcgcattgatcgaggtcttgttggccgagacgctgcgctgcaggaagcctacgaagtccatcttgcggcgaacgctggcgggcacgtcgaggccgaccagcgggtcgtagaaatcgggcgggccatagacccagatcgaatcgtaatattgatcgatcttctgcatcacaccgttcttcttccactcggcgtcgagcaggtgaggggcgtccatgatctcgcgcaggccaagcacgagtgtcgtgccgcgcgccttgagataggccaacgtctcctcgacctcgcctttcaggcccatcggttccttgtcgacgataaagatgtcgggctggaacgtctcggccgtgtggcggatgatcgattcgcgcatcttcagcgtatcctgaagatcgatatggcttgccatcgacgtatattcgccgttgcgcagcttgatcacgctcggcaccttcacgaagtcgacgcgggcgcggtagtcgaaagcgccggcgatcgtcgcgcccgagatgatcaggatgttcaggccgcgatagtcctcgaccagcgcatgcgcgatggtgcgacagcgtcgcagatggccgagcccgaacgtgtcgtggctgtacatcaggatgcgtgcgtcttccaggcgccgggccatggacattccttccgggctactcatcatctagcaccgctgcttccaacgacgctggcgaccgatcgggggaggatcaatcgtcggccgttatttgtagggatctgccgcatcgcgcaagccgtctcccagaaagttgaacgccaaaataaccaagaccaccggtataattgggaaaagcaaccacggatagaacgcaataacacttacgctcttggcctccgtgagcaggattccccagctggtgatcggcggacgaaggccgagcccgaggaagctaagcgccgtctcgccgagaatcatgctgggaatggaaatcgtcgcggaggcgatcagatgcgacatgaagcccggcacgagatgccggccgatcacgcgcggcgtactggcgcccatcagctgcgccgcctgcacataatcctcctcgcgcagagccaagagctttgagcgtacggcgcgcgccagacccgtccagtcgatgatcccgagaatgatcgtaatcccgaaatagatcacgagcgggctccacgtcactggcatgatcgccgccagcgccatccataacggcaggctgggaagcgactgaagcacctcgatcagccgttggacgatcaggtcgaatacaccaccgcggtatccggcaagcccaccgatgacaatgcccagaaagaagctgatcgatatgccgatcagcccgatggtcagggaaatacgggcgccatagagaatgcgcgacagcacgtcgcgtcccaggcggtcggttccgaggagaaacatctggccgcccggcgccgggcagacgacgtggacattcgattgcacgagaccccagaacttgtaggaatcgccacggcagaaaaagcggatgggctgaacatcgtcggggttgtcggtgtatgtccgccgcaacgtgtccatatcgagcgacatggtgcgtccataaacgaagggtccgacgaattttcccttgtcgaacaaatggatgcgctgcggcggtgaatgaatgaaatccacgttcttggtgtgcaggctgtaaggcgccacgaattccacgatcaggatcatcaggtagacggcgatgaggaagaccgccgatgccaccgccaagcggtgctgcttgaatttccaccacatgagctgcttttgcgaagcaaggtggatgcgtgattgcgcggccgtcatcgtttcggtcgccatcggatcgaatggcgctgtcgaaacgaagtgcggcagcggcgcgccgggtgggggcaagggcgacattatttggtgctcctgccttgcaggcgaatacgtgggtcgaggaagccgagggcgatgtcagatatcagcacgccgatgacgttcaggaacgccaaaaacatcaggaaggagcctgcaagatacatgtcctggctctgcagcgccttgataagcatcgggccggtggtctcgagcgacagcacgatggcgacgatctccgcccccgatatgatcgacggcaggatcgagccgatgtcggcgacgaagaaattcagcgccatgcgcagcggatacttgaccagggcacgcagcggatgaaggcccttggcgcgcgccgtcacgacatattgcttctgcatctcgtcgagcaggttggcgcgaagccgccggatcatcccggcggtgccggcggtgccgacgatgatgacggggatccacagatgcgagaggatcgatctcgccttttcccagctcatcggctcggcgaggaatttctggtccatcaggtggccgatggtgacgccgaaccagatattggcgaaatacatcaggatcagcgctagcatgaaatttggaatggcaatgccgagcaggccgaacagtgtcaggccgtaatcgccccagctgtactggtgggtcgcggaatagatgccgatcggaaacgcgatcagccatgtcagcaggatggttgagaacgataccaggatggtgagccacaaccggtcgcccacgacctccgagaccggcaactggtactcgaacgaatagccgaagtcgccctgcagcatgccgccgacccagtagaaatagcggaccacggccggcttgtcgaagccgtactgtttgcggagttcctcgatttcctgaaggttggcgctttcaccctgcgcccgcaactcggcgatctggctttcgaagaagtcgccgggtggtagttcgataatggtgaagaccagcgcagagatcacgaacagcgtgggcaccatggcggcgatgcgccagagaatgtatctcagcatcgctcaggcctccttgaaccagaaggtgtcgggcatgtagatgccgagataggatgtcgggtcgaagccgtagaggccctgctccggcacgttttgcagtttcgccgacttcaaaatgggctgcagcgtgctgttgatcaggccgatggaaaagacctgctgcgtgtagagcgacagcatctggtgccagatcgcctgccgttcctcgaagcgcgaggtcgcgccccaatggctgagcagggctacaagctgctcggcttccggcaggtcgggcgcggttccgctctgtccggcggacagatggtacatgccccagagaggccattgcagctggtcatccatggtcggtgccaactggctgggcgacatgtcggcggtcgccaccccgttgtcgatgccgaaccagatcgacatcatgatgcggccgctcatcgcgcggttctggaagatgtcgcgttgcgaggtgcgggtatagagcgcaagcccaacctggcgccagtgatcgcgcacgagttcgagcacgtcggtgtccagattgctctcgcccgcggtttccacggtgatttcggcgcggcgtccatccggcaacaggcggatgtcttcgctgtcgcgctcggtcagccccagttcatcgagcaaccggttggcctcgtcgggatcataggcgatgaaggcgtcggcatattcctgcttgaacagcggactatccggcaacactgtatcggcgcttggcttgccgaggccatagaacgccaccatgttgatctcgtgccggttgacggcgagcgaaagcgcgcgccggaagcgcgtctcccggaaaagcttgcgccaggcatcgtcggcgcagttgaggttcggcagcaaggccacgcgcgagccgcgtatctgcttccagagattgaccttcaccgggaagcgcttctcggcgtccttcaggtacgtgtaatcggtaaagtcgacacccgtcgcctgcaggtcggattcgcccgcgccagccttggcggcgatgatcgaggacgagctgacgttcatgatgaaccggtcgatatagggcagttgcacgccgttctcgtcgatccgatggaagtacggattgcgcacgaagacgaactgctccgcgggcggcgcagtcgtgttgacccatgggtcgagcgatggaaggctggggttttcgggtcgcgaggcgcgcgacatcttgatgtgcagatcgacccacttcttgacccggttctccttcatcaacgcggagagacgaaagtcgtcctgatacttcttgtggaattgcttcagatagtggccgggcccgtagatgaccagcggcagcgggccggcgagcgccggcatgaaattcgggttcggtcgttcccaggtgtagcgcacggtcaggggatcgagcatctcgaaccgcggcagattcccgtgaggacgaagttccagcgcgccgccgcccggcgtcagctccttgttgaggatgacgtcttcccaccagtagcggaaatcgtcggctgtgaacggcgatccatcggaccagcgatgcccttcccgcagatagaaggtgaagacggcgtcgttttccgaggtgaagcccatgaggatgtcgggctggatctgcagcttttcatcatagccgacgagcctcgaataaccgtagaccgtcatgtagcggatgtccttcgcgctgccgataatggtgcgcacggtgccgccgtagacgccgggctgtagcccggccttcttcatgttgatgattcgcggatgggtcggcaggcggtccaccatcggcggaatgcggcccgcccgcagccagtcacgcaggaattcgggctcgatgtcgcggtcgccgaccgcctttgccaatgagggggcgacggccgctccaaccagtcccccgatgaaaccacgacgcgttaccatgcgcgcaactccttcacgtcggcgcctttgcgcgcacgcacgaaatgcccgttgccgaggtcggcataggcgagttccgatgcgtcgtcgtgctcggcggtaaaggtcacgccccaattctgcttgtccgccgcgccgtttttgcgaagcgcttcgaagtcgagcggccggtcgagatcggggaacggcacggctgcgaggagcgatttcgtataggggtgaacgggatcgcgcaggatgatttcacgcggagcgatctcgacgatacgtcccttgcacatgaccgcgatgcgatcggccatgtaatcgaccacggccagattgtgcgaaatgaacagataggtcagcccgagttccttctggagatccttcaggagattgaggatctgcgcctgcaccgaaacgtcgagtgcggagacgggctcatcaagaatgatgagtttcggcccgagtgccagcgcgcgggcgatgccgatgcgctggcgctggccaccggaaaagctgtgcggatagcggttgagatagcgcttatcgagcccgatcgcgcccataagcgcctcgaccttgcgattgcgttcggcgccgtcgccacgatcatggatctcgagcggctcgctgaggatgttgcgcacggtcatacgcggcgacaacgacgacacagggtcctggaagaccatctggatattggtgcgcaattgctgaaggtcgtcgccggtcaccgacaggacatcgacggcatccttgccatcgttgaagaccaccgagccgccatctggcgccatcgcccgcatgaggatcttgctgacggtcgtcttgccgcagccggattcgcccaccagtccaagacactcgccacggcggatatcgaagctgacatcgtcgaccgctcgaacgcccgcgtgatcgcgcatgccgaacaggccgcggttgcgcgtcttgaaggtctttgtgagatttttcaccgataacaggacgtccggcccctcgatctcgaccttcttcttcttgccgacgagggattcgagattgacgggcacgtcgcgcaacgccttcagccgctcgccttcgcgcatatcgaagtgcggaacggcggccatcaggcctttcagataggcgtgctgcggattgcggaagatcgattccaccggtccggcctccatgatctcgccgtggtagatcaccaccacttcgtcggccatgttggcgacgacgccgagatcgtgggtgatcagcagcatcgccatgccgagcttgtgctgcagatcccgcagaagttcgagtatctgcgcctggatcgtcacgtcgagcgcagtcgtcggctcgtcggcgatcaaaagggcaggtttgcagatcagcgccatggcgatcatggcgcgttggcgcatgccgcccgacagttcgaaggggtacatgtcgaatgtccgcttcggattggcgaagcctacgaggccaagcatctcctccgtcttctgccgcgcttcctttttcgtcgcttccgtatggatcagcagcgattcgctgatctggttgcccacggtgtgcagcggcgacagcgacgtcatcggctcctggaagatggtcgccatccgccggccgcgcaaatcccgcatctcctcgctgtcgcgcgagtattgcaggatatcggtggctttgccatccagagggtcggtgaagacaatgcttcccgatgcctgagccgggtttggcaggatgcccatgatgctctggctgatgaccgatttgcccgaaccggactcgccaaccagcgccgtcactttgccgggcaaaatgcgcaaattcgcgttctttacgacacgcagcttgtcgccgaaaaccgagaaggagatatcaagattttcaatgcgcagcagatcggacgcggacgccataccaatgaaattccccagttttcttcgttccctttacgacgacactagcgtacggcaatcagggtgtccagttgatgacgaacacattgaaattggggacatttctgcattttattcggccaggcccaggccgtcggcccggggttgttatcgcatgaagctatccgcggtcgcggcacgtcgcacagcttgccctcagcatcccgaaattccgcttgtcggtcaaacgtccggcaagcggcgagatgttttcacaatacccttatgcacggccgtcggaggtgaatctcgcggtcacgttcgcgtcagttttccaatatggcttttggcgggtttaattcgccgcgctcttacactagatcagagatcctttctgttttaggcgagatccgctttgcaaagcacctctgtattcgacgctctttcaaacaagatcgagactcgcacggcgcgcgccggtatcatcggccttggctatgtcggcttgccgcttgccatggcgattgcccgcagtggcttctcggtcaccgggttcgatgtcgatccgaagaagatcgtcgccatcgatgcgcgtcgctcctatatcgacgcggtcaccagcgccgatctgcaaatcgagatcgatgccggacggtttgccgcgacgaccgagttttccggccttgccgattgcgatgtcatcgtcatctgcgtgccaacgccattgaccaagcaccgcgatccggatttgtccttcgttgaggcgacttcgcgcacgatcgccgagcatcttcgcaagggccagctcgtcgtgctggaatcgacgacatatccagggaccaccgacgatgtggtgaaggtgatcctcgagaagaccggcctcaaatccggaacggacttcttcgtcggcttctcgccggaacgtgaagatcccggcaaccagcatttcaacacggccacgatccccaaggtcgtcgccggcgacggcgcggaggccctgtcgctgatgtcggccttctatggcgccgccgtgaagacggtggttccagtgtcgtcgaatgccaccgccgaagcggtcaagctgacggaaaacatcttccggtcggtcaacatcgcgctcgtcaacgagctgaagacggtctacgcggccatgggcatcgacgtctgggaagtgatcgatgcggcaaagaccaagccgttcggctacatgccgttctatccgggtccggggctgggcggtcactgcatcccgatcgatcccttctatctgacctggaagtcgcgggaatacgagttgccgacgcgcttcatcgaactcgccggcgagatcaactcggcgatgccgcgttacgtggtcggcaagctcgcggaagcgctggatatccgcgtcggcaaggcgctcagccgttcgcgtgttctcatgatcggcctcgcctataagaaaaacgtggcggacatccgcgaaagtccgtcgttgcggctgatcgaggtgatcgaggagcgtggtggccgcgcggattatcacgatccgcatgtgcccgaaattccatccacgcgggagtatcaggctctgaaggggcgtcgctccgtggcgcttaccgacgaggtgctggcaggctatgacgcgatcctgatcgcaacggatcacgacggcgtcgattacaagtgtcttgccgaaagtggcgcgctgattgtcgacacgcgcaacgtgttcgcgcggctcgggatcgccgccgacacgatcgtcaaggcgtgacctcgtcgatcgacagcgtcttgccggtgatctggctggcggcgacggcgtagccgccgcttgctccatcgatgaaatgcatatgatcgcgcgaaagcggcgtcggcacgaagcaggtcatgagtgccgatgtctggctgtgaagcccatagcgcgcgatgccgtcggcctgcgccttctccagcagcgtacggatgagaccgagacgatgtgcgtcgatgtcgagcgtcatcttcaggccgtcgtcgaacttgcgaaaatcggagttgccggcgacatctcgcttgtagagccgggcatcgaagcttccgaatttcaggttcagcttgtgcaggacaacggtgagcgcgatctgcagcatgatgatgatacgctgccgcagccgccccgcgtgcggcgccgtcgcgcggacctcccggttgatgcctttcagcgagaagccaagcgccggcccgtcggccggcaccggatgcgcatcgcggctctgctccgtggagatggcgaccacgtcgctgaccagctgtcggaattccggcgtcacgccacgctcgcccggcaccgcgatgatcgaagcgatctcgccgttgctggattcgatcgggttccagcggcaggaaaggccggtcagatccggccgcgcgcctgccggcgccggttcgatggcatagttgccctccttcatctgcttctctgcccagctgcctccgccgcccgcgaacatcgcgtagctgacgaacgggctcgccgaatagcgcgcgacgcgcacgtccagtccctcgcgccggatgtcgctgatcggcaccagggcaatgcgcagtgtcagctgcagatcttcctcggcccatcgctgagccgcggcaagcgcgtcacgcgcagccgcttccatcgagccgggcagggcgacgatcgccccgtcgccgccgaaaacgaagggataatcgccctttccaagcgcattgagcacggcggagatgacgctcgctcccgccatgttcacgtccttgtagcggccatccatgatcgcctgcgtcgagcccacgatatcggcgaccgccaacacccaatcatccggcaggcgccgatagttattggtatcggtgacgccctcgaactgatcgaagaccggcacgctggcgaagaagctgtcgttcgaaatgtcgttcataccagaacttagaacagacagcccgacctgcggcaatgcattttcggctcgggccggtcttgcccgtttccaattcgacatgcggccggcgacgacgataaccttcatgtgagtttgccgcgtgccggcgcatgcctgcttgcgcggtcgaacctttgccgctagctctgtcaccaacgcacatgcctgcaacgcgggcttgcatccttccttcccacgaacgcgatgtcccgacatccgctttcaagacttacgaacggacacagtcgcagatgagccgcctcgacagcttcattcgccgtttgacggcccagcgtgatattctgaactccatcgtcgatctggttcggacaatcgagggcccggtgctggaattcgggcttgggaacggccgaacctacgatcatctgcgcgagcattttgccgatcgccgcatcatcgccttcgaccgcgatgtgcgctcctattcctcctcgacgccgcctgccgagaacatggtgaccggcgagatccgcgaatctggccaggcgttcgtcggtatcggtgctgctctcgcgcatgccgatatcggcacggggcatgacgagatcgatgcggtgacgctgacgtggctaccgcaactgatggtcggcgttctggcaacgggcggcatcgctgtcagtggtctgcccattgaacggcccgagctcgagccgctgccgcttccaccaggtatcaaggaaggccgctactacctttaccgtcggcgctgatcagggcaggaacagcacgtcgtattgctcgatgtcgccgggcagatccttcacggccatttccttctctccatcttcgaagaagacaaggcagcgatcgtagaaaccggcaagggtggcgatgaactcgcctgtctgcgtggagccgtagaagcttggcgtgaactccatgtagagcggcacacggcgcgacaggagcggaaccatggaccggcaggcgaccggctcgtatccttcgatatccatccagaccaggccgatcgcggcggggtcgatcgaaaggtcggccaatatctccgttaccggccgaaccgggacgctgatcttcgtgtcgctcgggctttgtcggatcgcgctgctcttgccgtgattattggcattcatgaagaagtcgatctcgcccgacatgtcgccggcggcgcaattcaccgcggtcactttgtcgtcgagccgattttgccgcaggttgagctgcagcagcggaaagttgcgtggatcgggctcgatggtgacgatgtgccgataggcgccgctgagcgcgaaatacaccgtctgcgtgccgatattgccgccgatctcgagcagatgcgtgtcgcctcgcaacaggccgcgttggcgcaggatcgtcagcaaccggtcgacgtgatcgcgctcgaaatgacctttgcggaacaccttgcgaccgatgtagtcggcgggagaaaaggtcatcaggtggtcgccggcatcgaccgtcatggagacgacgcgcggcccgatgctttcgatcagaatccggcggccggtgcgcgtgtcaagcagcctgcgcgcgatcgcgttgcgcgccttgcgccagcgttttgtccagtatttggcggtcagccgcgattggccgggcatcaggtctgtccttcgagcagttcgatcgccttgtctcgcggaatgacatagactttcaagggcagcgcgcggcccctgacgctgatttcacgactttctatgccgcccatgtcggcgccggcgagcgcggccaccggttcggagacgacaagcgcgacctcgaattccttcgcggccgcctccaggcgactggcgacgttcaccatgtcgccgatcgccgtcgtgctgcgggcgcggccaaagccgagcgttcccaccaccgccgggcctgtatgaatgccgatggcgatgcgcagcggcatcgacagttcgtccgacagttcctcgctcagcttctcgatgtcgcgcgcgatcgacgccgcggccgtcagtgcttgccggcaggcttcctcgggcgaagtgccgatgccgaagagcgccatggcgccgtcgccgatgaatttgtccacccggccacctgccttttcgacagcattgccgaccagcgcgaaatagcggttgagcaggaagacgatatcgaagggcaggcggtcctcggtgagggcggtgaagtcgcgaatgtcgcagaagaggacggcgatctcgcgttctcgaccgggcgccgtttcctgcgtgttgatggggagggccgcttcggccgcgcgaagaagcagcggcacgaccgtcacgtcgtgggtcgggcgcaactggcaggcaagccggacgtcgggcgcggcattgatccgcttcagcgtcgattgttccatccggtcgggtgcggggagggcgtcgagattgctcagcacctgcacccgacaggtagagcactgacccttgccaccgcagacggaatagtgcgggatacccccaagccggctcgcttcgagaaccgtggagccgcgcggaacacgcaccagttccccgccttgatagtgcacggtgatctggtcggcgcgctccttccagcggcgatgcgtccttgccgcgaagacgagaaacagagcgcccgcgaacgacccgtaaaggccggtgcggatcatcgtgacctgcgcgaccgcctgcggatccttcatgtagcgcgaattgagattcgcttcgtatctgccgacattggcaattccctcataggctggctcggcaatggtgcggcccatttcgatgaagccgaggatggcgagcacaggcaagaggatggccacgaccagcagagacgcctgtatattgctgtaccaggtgcgataacgtagccagtaatgcaggccgatgcaggcgtggaaccacacgacaacgagtgctacgacctggcgcaacccgttgccgggcgcggtgatccacagcgtgcgcacgaccgtttcgtaattgtcgcggtatccgtaaagcgcgctgacgacacgcgtgccgacgacatggtcgatcaacaaaatgggaattgccaggccaagaacgatctgcgcaagctcgcccttcggcatgacaaggctgcgccggacgtagatcgatcgcatgacgagtgcgatatgggtcaaaatcgcgccgtacagaagcaaggtaccgaccggatttcgccacagtgcggtgaaaagccgcctgccttcttccgccgcggtaacggaaatgaggccgagcgcatgattggagaaatgcaggagcacaaaggcgaacatgacaaggccggagcccagccgtgcgcgcctgatcgagcgttccgaaaaaatgctgctgcctgccgcgacgctcgccattcaatcccgttcttgaaacccaaatcacatttgcactagtgatagggcaattgaggttttattgccgcctttcgaccgtccgtgcacgtcacatgttcgtcagcaagccgtaaggatgaagaccatagcaaactttcgcccggcgggcacaggggccggttttgaacactgcgtctcaatatggatgacctcatgcgcatagcattctacgcgccgctgaagtcgcccaaccatccggtgccatcgggggatcggctgatggcgcggctgctgatccacgccctgcagatgggtgggcacacggtggaaatcgcgtccgaattccgcagttttgcgtcgacaccggcagcggcggtcggcctcgaaggcgagatggcctgcgagctgcagcgactgcgggccaagtggtcgagcgcgggcaaggctgatttatggttctgttatcacccctattacaaatcggtggaccctttcgggccggcgctatcagcggaattcggggttcctctcgtcaccgcggaagcttcctactctcccaagcgcgatcagaccgactgggcgccgcaccaggcgcgggtcggcgcgatggtcagggatgccgcggtcaatatcgccttcacgcggcgcgatcgattgggcctggagcaggcgatccctgaagcgcgcatcgcggcacttgcccccttcatcgacaccacggcatttgaggagctgcagccggtgccggagccgacgcggctgatcaccgttgcgatgatgcgcgccggcgacaagatgcaaagctacacgatgcttgccgaggcgcttgccgcgataaggcacaagccgtggacgctcgccgtcgtgggtgatggtccgatgcgcggtgaggttgagcgtctcttttcgacattcgagcctggaaggatcgattggcttggagagcgtggcgcggatagcatcgctcaagagctcggcaaagcgggcgtctacgcatggccgggctgcggcgaggcttatgggcttgcctatctcgaggcacaagccgcgggcctgccggtcgtcgcgcagaatacggccggggttcccgaagtcgtccaggctggcttgaccggattgctgacagcggaaggggatgttgccgcctacgcttcggcgatcgacgcattgctcgacgatccctccagacgcacggcgatggcgcgcgccgcgcgccgcttcgtcttgagcgaaaggtcgcttgatatcgcggccaaggtgctcgacgacattttatgcagatacacgggaaaacaacgatgacggctcatgatatctggacgccattgctgaccgagcttgaccggtggcaggccgctggcaaggtcgcccgtttctggcttcgcgacgacgacgcgatcgagccgacgccagcgctggagaagctgttggagctagccgccaacgccggcctgcccttgacgctcgccgtcattccggcgtccacgggcgaggcgctggcaacgcggctggctgacgagcggcacgtgctggtggccctgcatggatggtcgcacaccaaccacgcgggacctgaccagaagaagcaggaacttggcgcgcatcgcgcgccggatatcgtgcttggtgaactgcgcgacggttttgccattctgcagcggctgttcgggcagcggttcatgccgatgctggtgccgccctggaaccggatcaacggcgcgcttattgcggaattgccgacgcttggtcttaaggtactgtccgtctacggggctgccaaggcggatagcccgatcaagctgctcaacacgcatgtcgatatcatgaactggcacggcgtccgtggcggcaggccgcatgctgagctggttgccgatgtggtagcggaactgcgcactcgcttcgatgatgacgcggagccgatcggcattctcacgcaccatctggtgcatgacgagaccgcctgggcgtttctctccaaccttctgaccgagacgagcgcccatccggcggtcagatgggcatcggcaacgtcactggtcgagagctagctagtctagtctagagttcgagaacctggttgtcgcgggccgcgaacgaggccgggaaggcggcctgggcctgcttttccatggcttccagctgcgcgtcggtgcgcgagggagcgtggtggaagagcgcgaattgcttggtgcccgccatcttcgccagttcgatgccatgctcccacgtcgagtggccaaagcccttgaagcgctgcatttcgtcttcgttgtaggtgcaatcgtagacggcgagatcgacgtcccgcatcatttccagcgcgaccggatcatggtgaccgggcgtatgctctatgtcgtagatcagcgcgatggagcggccctgatactcgattcgataaccgatcgccccaccggggtgattgagcatgaaggtcttgatcctgacgcccggatgaggctccaggacctgtccggcgtgaaagtcgcggaagctcatcgtcgcctggcagatgtcggtcttcacagggaaccatggggggctgatgaattgctcgatcatctcgcgcgtcgtcatcttgccgtcgagatgaccggaccagatgcgcagatcgatcgccggatagtagatggccttgaagaacggcaggccgatgatgtggtcatagtgacagtgggtgaagaacagatcgacgtcgcggacctgatcgttgagcatgcaaagcccagcttcgcgggcgccagagcccgcgtcgaagatcatgcggtgttcgccacagcgaatctcgatgcaagaggtgttgccaccataacgatcgaactcaggtccggagaccgggatactgccgcgaacgccccagaactttacttgaaagagatctttactcatcgctttttcaaaatggtccgaccccaccgcgctaacgtgatcctcattggaacctgatgccaagcgtggcattccacaagccgtcttgtcttacgtaccgtatccacactatcaaccaaaccggtggaaattcttaagcaaccgggttttgtcgcagaaagcaacagcttatggttcgatttcggtaaattacggtgcgcgatctgccagctcacggtgccgaatcctgattttcctgaaaaatatatgggaattcgaatacgggaattcaaatggcgcaaggcccgacttaagtcgaaggattcggctgacaatgcgcgcgcagaaatcaggccaaggcctcccagccttgcctgatttcatctgccgctgctttcgctttcgcaggcttcgccaggaaaaacactgactaggccatgatcaaatggtttcgctacccgcgcggaggcttaggcgcctttcggcacaaacacagccacactttcgcggtcgattgtcagcggttccctgacatccagttcagcgaacgggtcatcggccccggtcgcaagcacacggctccactcgttgatcccgttcaccgcaggaaaacggatctcgcagtcgccgccggcgttgaacaccaggaacagaccggccgccttttcgacgtcgggcgtattggcgctgtaggacatgtagacactgagcaggcgaagttccggatcgctccaatcctcttcccccatctgctcgccatcgggccgataccaggcgatttcggttcgctcatcctcgccgatggcgccggtcagaaagcgctcctggcgaagttcgggatgatcctttcgcaacgcgatcatcttctggcagaaggtgaggaaggggtcgtccaggcccgaccagtcgacccagccgatctcgttgtcctggcaataggcgttgttgttgccgccctggctgttgccgacctcgtcgccggcgacgatcatcggtacgccctggctgagaagcagcgtcgccatcatgttgcgtcggcgccgcgagcgcgcatcgcggatgccagcgtcgtcggttgcgccctcggctcccatattgtccgagtgattgtccgaatggccgtcgcgattgtcttcgccgttcgcctcgttgtgcttgtcgttgaacgagaccgtgtccatcagcgtgaagccgtcatgggcggacaggagattgaccgatgatgtcgccgcgcggtcggagtggttgaactgcagctgcgagccggtgaggcgcgaggcgatatccggcgccatgccgccatcgcccttccagaagcgcctggtgtcgtcgcggaatttgtcgttccactcccggaatggatgcggaaagccgccgacctggtaaccaccttcgccgacatcccaaggctctgcgatcagcttcacgcctgacaggatcgggtcctggcggatcgcgccgaagaagatgccctggcgatcgaagtcgagatcctggcgtcccagcgtgctggcgaggtcgaagcggaacccatcgacgtgcataacgccgacccagtagcgcaggctgtcgagcaccatgcgcatgaccatggggtgcgcgacgttcagcgtattgccggtgcccgttgtgtcataggtgtggcgcggatcgtcgggcgagaggatatagtagctggcattgtcgaggccgcggaaggagagtgtcggcccgcgctcgctgccctcggcggtgtggttatagaccacgtccatgatgacctcgataccggcggcgtggaacgccttcaccatggtcttgaactcggtgatcttgcttccggacagatatcgtggctgcggcgcgaagaagcccagtgtctggtagccccaataattggtgaggcctttctcgagaagatagcggtcgttgggaaaatgctggatcggcagcagctcgaccgccgaaatgccaagcttcgtcaggtgatcgatgatcggctcgctgcacatgccgagaaacgtgccgcgcagttcatccggtacgtcgggatgcgtcatcgtcatcccgcgcacatgcgcctcgtagatgatcgtgtccgtccaggtgcggcggattgcttgatcgccgtcccagtcgaaatccgggtcctgcacgatccccttgaccatgtaaggggcgctgtcgcggtcgtcgaaggagagatcgtcatccttcgcgccgatcgtgtatccgtaaagcgcgtcgtcccacttgagttcgccaagtacctgcttggcataggggtcgagcagcagcttgttcgggttgaaccgatgaccagccttggggtcgtaagggccgtgggcgcggtagccatagacggtccccgggccgacgccggcgatatagcccgaccagatgtcgccctcgcgctttggcagcgccatgcgcgcaacctcctccttgccgtcgggcgagaagaggcagagctccatctgttcggcatgggcggaaaataccgcgaaatgcgttccctggccggtgtactcggcaccgagttcgggcttgagaaagtcgagttctgaaaacgaaaagctcatggaacgcccccggcttgattgttggcctgcagggaacgttgttgcgctgcaaaggttccttggatcaaggcgagggcgtatcgatttgcgccaccgcaatcacggcatcagctgtccgccgttgacctcgatgatctggccggtgatgtagccggaaagtgttggcgatgcgagaaacaggtaggcgccgacgcaatcctccgatgtgccgacgaaacccatcggtatcgatttgcgctgcatctccatctgctcgtcattggtgtagcgctcatgaaacggcgtggcgatcacgcccggagctaccgcgttgacgcgaatgcggtcgggaacgaattccttcgcatggccacgggtgatggtcgacacgaaccccttggcggcggcgtagagaatggcgccgccaccgccaccgtttcgggccgcgatcgatgtcgtgttgatgatgaagccgccctgcttcttgagccacgggtgcgccgcgcgggtcgcggcgagcaccgagcgggcgttcaggtccatcaccttctggtaatgctcgtcggtgtattccgaggtcggcttgcggccgagcattccgccggcattgttgatcaagccatcgagatggccgaacgtcttggcggtctcttcgaccacacgctcggtctcgccctctttcgacacgtcgccatgcacgagatggacgtggccgcctgctttcttgatctcgtcggccagcgcttcggcctgttcgcggctggagttgtaatgaatgccgactttcatttcctgggcggcaagcgccctggcgagcgccgcgccgattcctgtcgaggcgccggtgataagaacggccttgccggccaggtcgggaattttgattgccgcaagcgattgcgcaagatgtgccatgaaaacgatctcccagttctgtcgaaaggccggcgttcgtccggccaagatgtgcccgccggattagattggagatcagctggccgcgtcaagctccggatagtgacggaaaatgccgtcttcattgaaggcaaggcggcgaggggaggcgagataggcggcgatccggggccgctcgcgcactgccgcatgcaagccagccagggcatggtagcggtgctgatatcccttcatcgcattgggaaatgcatagcaaagcccctcgatcacctggaacagcgacagatcgacataggaaaggtccgagccaacgatatgctcagcaccgctcgggttctgcttcagcatgcgctcgaaatagccgagatatttcgggatgcggtcatcgatgaacgccgtggagcgcgccttcgcttctgccttctgatcttcgtagtaaagtcccgtcgatatcggatggtgggtgtcgtgcacttcgcagacgaaatcggtaatcgtcagctgaagcccgttcgcgacgtggcgcgggccttcatcggaaggagcgaggccgagcttcgggccgaggtagaagagaatgttggcgacgtgcgagaccatgaggtcgccgtcttgcagaaacggcggggcaaatgggatggttgaattcaaccctttatccaggatttccagcatggcatcggtgcccagcccgggctggtcgtgtcgcgcgacatcgacgtagtcggcgcctgcctcttcgagcgcgagacgcacgaactcgccccgtccctgaatgccgttccagtagtagagttgatacgccatccgcgcctccgtgaaaggcgcctgggcgttctatcgtcgttcaggcgccgcctgttgaaatatatcggcgattggcatcgccgccagctttctacttgcggccataacggcgtgaaacagccacgatacgttcaagcgccgaccggcgcaccgaaattgcagccgatttttctcggaagaagaaggccacgagattgtcgacgacgacgacaagcaacatggcgagcgccagataagccgttgcagctaggaccagggtcggcattgtctctcacacgggagcgatgaacatgtagcaacctgctacgatgagggaaacgagaattgcgtcgaagtagctgcggttcatgaccattctcccagttttgcaggacaaccgtcaaacgtcacttttgttccatccagaacagtcaccgccacacttttaagcaaagctgaaattgcgctgcgactgaagactttccggcattcattcaatacgactgaattaatgcagagatatgactgaaatgaaaacagggcgccttgggagcgcccttttaaatcaataatttgcggagatcatgccgactttcgagccggcgatttcttaggcgcggccttcgtcgccttcgccgcgccgctcaccttgatctcgggagccgcgcgcttcgttcttgtctttacttccttgccgtcggaagacgcagccgatccctcgagcgcggcgcgctctttcatcgcctgttcccaatgcgcatgatcacgcccggtggggcgaccttcctcttcccagagcgcatacgcgcgcttctgaacccactctctttgagtttccgtcatcgccgatctccactgcagggatgccatcgttcaaacgcgatactaattgaagagttccagacgaatcgcattgtttcaagtcatttctgacacactgcaaaaatatatgcggcgttgcagcacgatgattaagcttaggtgccgctcatgctccaaatacggacatatcgagcttcagatagcgccactatactatcttcggaccatggacgctatccgccgaacggggccgggcgttgctgccgaaggcgtgattgaacagtgccgaattgcgactatatcttgcctgcatgttttatctcatatcgacctattggccgcatatcctgttcgtaatttcgttgctcatgggcgccgccgcggcgatccatgcgaccatgacgaaggtggaggtgcgcgccgcgatcggctgggtcggcgtgatcgtcttgtcccccatcattggcgccgtgctttacgcgatcgccggcatcaaccgcatcaggcgtgcctccttgagcatgcgccgcgacgcgctgatgccacaggccgatctcgatgagttggaaacgttcgacgcggaagccgagatcgtcatcagcggtttcgggcgacgtttcgcagccctgcagacgctcggcgaccgcgtcgcccgtagtccgatctcgaccggcaacacgatcgacatactcgacaccggcgatgagtgctacgccgcgatgaaggcatcgatcgacagtgccgagcgaagcgttcttctcgaaacctacatctttgatcgtgatccgatcggtctcaggatcgccgatgcattgatcgcggcgacaaagcgtggcgtgctggttcgcgtgctgatcgacgccgtcggcgcccgctactcggtaccgagtattctgggttatctggaggagggcggcgtttccgtttccgtattcaacggcaatgtcatcatggggttacgcctgccttacgccaatcttcgtacccacagaaagatcgtgatcgtcgatggccgggtggcgctgacgggcggcatgaatatccgggcgggctttacacgcgagatcgccggcgaagacttcgcgcgagacacccatttcatggtcaccgggccaatcgtggccgatctgttcgacatcgccgcggaagactggcggttcacgacgggcgaggcgcttatagaagacgagtggcgcatcgccgcgccggagcgggagccgggcgatcccgttttcatgcgcgtggtcgcttccggtcccgacaggcgggtggagacaaaccacaggatgctgatgggtgcgttttcggttgcccgtaaatcgatcaagatcatgtcgccctacttcctgcccgatcgggaactgatcagcgcgctggcgaccgccgcacgccggggtgtggaggtcgatatcgtggtgccggccgccaacaatctcgttcttgtcgatcgggcgatgaccgcgcaattcgaccagatcgtcagcaactattgtcgtatctggcgcgccagcggctccttcagccattcgaaactgctgtcgatcgatggcgtctggtcctatgtcgggtcgtccaatctcgatccgcgctcgctgcggctgaacttcgagatcgatctcgaagttttgaacgaggggttcgccaacgaaatagaggagcatatcgacgaggccatccgctcggcgtcgccggtcacgctggaggggttgcggtccgagccttttgcagtccgtctgctgaacaaggttctctggctcggctcaccctatctgtgaccgtttttcgcgcttcaacatggcaacttcggacagagcgcctatactgaaaccaagggaaccattcgcttcacggagaaccggaaaacaacgatgcatgccaggaacaacaatctgccagcaagcattcttgcttccataagaaaccacaggaagcgcatcgaactggctcctgacagcccgatgtcacggcccgagggcacgctgattgcctcctacaacgtgcataaatgcgttggcaacgacaggcggttcgaccccgatcggaccagccgcgtcattcacgaaatcggtgccgacgtcatcgcccttcaggaggccgatacgcgtttcggcgagcgtacgggcattctcgatctgccccggctcgaacgggagagcgggctgctgcccgtaccgatcagcggcgtcaacaaggcgcatggctggcacggcaacgtggtgctgttcaagaaagggctggtcagagacgtccaccagatcaagcttccaggcctagagccgcggggcgcgcttgtcgccgaactcgacctcgagcggggtggggcgctgcgcatcatcgccgcgcatttcggcctcctcagacattccagggcgcagcaggcgaaagtgctgctcgaattgatgacggacaaatccgacgttccgaccatcctgctcggcgacctgaatgaatggcggttgggcgatcgctcgtcgctccactcgtttcagtcggtcttcggtccgcagccgctggccgtgccgacctttccagcgcgtttgccggtacttgcgctcgatcgcatcatggccaatcgcaagggcgtgctgaccacggtcgaggctcacgatacgccactgtcgcgcgttgcgtccgatcatctgcccatcaaggccttcgtcaatctgcggcgagcggccgagcccgcctgataagaatctagccgccaggtttacaataggcgtctcgcgcatcttgacagagtttgcagtcgtgcgaggttcgcgcggaccggcatgggggccggcgcggagagtccagctatgcgaagcgcacaccattctggagatgcggtcggccggtcgatagcggccgcgctgcgtgcggccgtatcagtcgccttgctcttgctctgtctcgcggctccctcgcttgccgcagaagagcccgtccagacggaggcctcgaaggcacaggtcgcgaagctgctggacaagatgggcgagtattattccaaggccggtacccttgccgagcgccgcgccgctttcgaacagttgatgcaggagacgccgggcccgtcgaaagtgcagatcaggcaggtcgatgccggcggcgtggccgctgagttgatatggccggcgcgggttcactacgcgctcgggaaaagggccatcctctatgtccatggcggcggcttctacagcggctccctggatacgcatcgcgcgtcggcggcttcgttcgcgaaggcggcatcggcggatgtgcttctgatcgactaccggctggcgcctgaatatccctatccctcccagatcgacgatacgttgaccgcctatctgtggctcctcgattccggatacgagagcgacaacatcgtggtgctcggcgatgccgccggtgggaacctcgcgatccaggcggtgctccggcagatcaagttgcgcgggccgccgccagcggcagtcatcgccatcagcgcggttacggatcttgcggcgaccggcgcgtcgatcacgaccaacgccgccaatgatccgttcgggaatgcgttacagatcgaggcggcgcgaacggcctatcttggagaccgttcgccgacggatccgcgcgtgtcgccgctttatgccgacatgaagggatttccgccgctcctgatgcaggtcggctccagggagatctcgctcgacgacaccttgcgtctcgccgatagggccaggcaagccggtgtcgatgtgacgaccgaggtgctgccgggaatggtgcaccaatggcacctgttcccgttctggctcgatgacgcccgcaagtccaaccagcgagccgctgaattcgcgctccagcatttcgccgacaagccgcgaccgtagaaacgacaattggaactcacccggccgccaagcggcaccgtggccgggtcgatcctcaggccgaccggaacagcttccagcgggtcggacgaaatgcgacgccgccgtgctcgaggccgcccgcggctaccggcggcagctcaagctcgatcggcggatggccgtgtgcgatgtcgatctcgacatggcgcgttccggcaacgcggcggctgctggtcacgacacctgcgatgccctcggtgccatcgcgaatttcgatgtcgtgcggacggaaatagaggctcgcttcgccatcggcctcaccctcggcgcggatgccgagcgagcgcccgtcgaaccagatgtcgccgtttgaaatcttgaccttcagacagttcgattggccgacgaagccgaagacgaatggcgaattcgggtgatcatagacatcatccggcgtgccgacctgctcgatcgcgccctggctcatcaccacgacccggtcggcaagctccatcgcttcgtcctggtcgtgggtaacaaagacggtcgtgtgcccggtcctatcgtgaatctcgcggagccacttgcgcagatccttgcggacctgcgcgtcgagcgcgccgaacggttcgtcgagcagcagtacattcggttccaccgccatggcgcgcgccagcgccacgcgctgccgctggccgccggagagctgcgcgggatagcgcttttcaaggccgggaagctgcacgagatcgagcaattccagcgcccttcggcgtatctcgtcccgcggggggcggcgtgaggaatggcggaccttgaggccgaaggcgacattgtcgagcaccgtcatgtggcggaacaacgcatagtgctggaacacgaagccgatattccgctcctgaacgctcttgcgtgatgcatcctcgtcaccgaagtagatcagcccctcggtggggctctccaacccggcgatcaggcgcaggagggtcgtcttgccggagccggacggaccgagcagcgcgatcagttcgccggaacggatatcgagcgaaacgtcatgcagagccggaaaccgatcgaattccttgcgtaggttttgaacacgaacttccattctaattcctcagtgccgccggctcgcggcgatttcatcgctgtatcgcatttccagcaaggtcttcaaaacaagggtgacgagcgcgagcagcgccagcaaggtggccacggcgaaagcaccggtgaaattatactcgttgtagaggatttccacctgtagcggcatggtgttggtctggccgcgaatgcgacctgaaacgaccgagaccgcgccgaactcgcccatcgcgcgagcgttgcacagcagtacgccgtatagcagtccccacttgatgttcggcaacgtcacgtaccagaaggtctgccagccgctcgcgccaagcgagatcgccgcctcctcgtcgccggttccctgctcctgcatgagcgggatgagctcgcgcgcgacgaagggaaaggtcacgaacatggttgccaggatcagtcctggaaccgcgaagaggatcttgatgctgttggcgctcagccattgcccgaggtaggtgttggcgccgagcagcagcacgaacacaagacccgatatgaccggcgagaccgagaagggcaagtcgatcagcgttgtcaggaaggccttgcccttgaactcgaacttggcgatcgcccaggcggccgccacgccgaagacgatgttcaacggcacgctgatgcccgcgacgatcagcgtcagcctgatcgccgaaaaggtttccgcgtcctgcaaggccgtgaagaatgccgccggcccctttcgcaacgcctcgacgaacacggccgccagcggcaggatcaggatgagcgtcaggaacaccagtgaaatggcaatgagcgtccaccgcgcccaccgatgctcggtgactacggatcggactttcgccgcgggagcattggtctcaagcgccattgccatacctccttctgctccagctctggatgaggttgatcacgagaagcatggcgaaggacagaaccagcatgacggcggcgatgccggtggcggccgcgtaattatactcttccagcttgatgacgatcagcagcggggcgatctccgatttgaacggcaggttgccggcgatgaagatgacagatccgtattcgccgacgcctctggcgaaggccagggcgaagcccgtcaagacagccggcgccaggccgggcagcagcacccgtgtgatcgtctgcaggcggttcgcgccaagcgtggccgccgcctcctcgacctccttgtcgatctcctccatgaccggttgcaccgtacgcaccacaaagggcaggccgacgaagaccagagcgaccacgatgccgacgggtgtgaaggcgatcttgatgccgagtggcgtcaggaactgcccgagccagccattgggggcgtagagcgtcgcaagcgcgataccggcgacggcggttggcagcgcgaagggcaggtcgaccatcgcgtcgatgatgcgcttgccgggaaagcggtaacgcacgagaacccaggcaagtacgatgccgaagaggacgttgacgcaagcggccgcgaacgcggtgccgaagctgatccgcagggcgttcaccgtgcgggggtcaatggcgatcgaccagaatttctcccagccgagttcgctcgaacgccatgcgaggcccgaaaggggtatcaggatcagaagggtgagccagatcaaggtaaagccgagtgccattccaaatcctggaatgacactcggccgcctgaaccgccaccgcgtggggctatgtgctctcatgcgatgtattattgtgccggcttgtagatttggtcaaacacgccgccatcgccgaagaatttcggctgcgcttccttccagccgccgaaatcgtcgatcgtcgcgagcgtcagcttcgggaagcgggcgatatcggcaggatcggctgcttcaggcttgatcgggcggtaatagtgcttggccgcgatcttctggccctcgtcggaatagaggtagtccagataggcctcggcgaccttgcgcgtacccttcttgtcgacattaccgtcaaccaccgcgaccggcgggtcggcacggatcgagaagctcggggtgacgatctcgaactggtccgggccgagttcctcgagcgacagataagcctcgttttcccacgcaagaagcacgtcacccagtccgcgctggacgaaggtggtggtcgcgccgcgtgcgcctgtgtcgaggacgggaacgtgctgaagcaggctcgtcacataggcctgagccttcgcgtcatcgccgccgttggcctgcttggcccatgcccaggcggccaggaagttccagcgcgcgccgcccgatgtcttcgggttcggcgtgatcacctgcacgtcgtccttgacgaggtcggcccagtccttgatgcccttcggattgcccttgcgcaccaggaacacgatggtcgaggtgtagggcgtcgagttgttggggagcttgctcttccagtcggctgggatcttgccggtctttgcggcgatcgcgtcgatgtcgccttcaagagcaagtgtcacgacatcggcatcgaggccgtcgatgaccgatcgcgcttgtgcgccggagccaccatgcgaagcctggattgccaccgtctcgccggtgtccttctgccacttctgtgcgaaggcggcgttgaaatccttatagagttcccgggtcggatcgtaggacacgttgagaagcgtctggtcggcaaaagccggtgcgacagcgccgatggcgaaactgcctgtcagaaccgcgaccgcgagaagccgggtaatccgttgtgcgtgcatgggaacctccttcgttgtgatcaaactctaccaacttggtcgtataatgaaacgaagattgtttctgttccatacggcggtttcggaatgacgtgccatttcgtccgccgttttgaaatgaatgtgctgtgatgcggggctgccggcatccgacggtctgactcgtgcggcgccagaatgtgggaatttcgcgagtgccttgcgtggattcatgagcatttcatcgaggcgggagcaaaagcctcgggacggaattgaaatccgccttgttcggcgattatagtccgccgacgccgcgctcgactcgcgcgcggggaggcaagggaaggaacgcttagatgaccaaagtccgcgcactggtgctggagcgccagcatgaactcgctatccgcgaaatcgatctgccgatggaaaccgggccgggcgaggtcaagatcaagattcacacggtcggcgtctgcggctccgacgtgcattattacacgcacgggaagatcgggcctttcgtcgtcaacgagccgatggttctggggcacgaggcggcgggcaccgtcgtcgaggtcggcgcgggggtctcgcatctgaaagtgggcgatcgcgtctgcatggaaccgggcatccccgatccgaattcgaaagcaagccggctcggcatgtacaacgtcgatcccgccgtcagcttctgggccacgccgcccgttcacggcgtgctaacgcccgaggtcgtgcatcccgccaactatacgttcaagctgcctgacaatgtgagcttcgccgaaggcgcgatggtcgagcctttcgccgtcggcatgcaggccgccaccaaggcgaagatcgcgcccggcgataccgccgtcgtgctcggcgccggtccgatcgggacgatggtcgccatcgcggcgctcgctggaggttgcgcgcgcgcggtcgtggccgatcttgcccagccgaagctcgatatcgccgcccagtatcagggcgtgatcccggtcaatatccgtgaagcgaacctcgtcgaagagatctcgcggctgacggacgggtggggagccgatgtgatcttcgaatgctccggttcgccgaaggcctgggaaacgatcatggatctggcacgccccggcggcgtcattgttgcggttggtctgccggtcaaccctgttggcttcgacgtatcgaccgcgtcgacgaaggaaatccgcatcgaaacggtgttccgctacgcgcatcagtacgagcggtcgatcgcgctgctcggttccggtcgcgtcgatctgaaacctctgatctccgaaaccttcggcttcgaggactcgatcaaggctttcgaccgcgcggtcgaagcgcggccgagcgacgtgaagctgcagatcgtgatggaataggctctaggatcggccggcgctgagcgtcgcctttctgaagatcctcctgaagacgagggccgcgccagccacgatggccgcggccccgatcgccatgacaagatgatgttgcagcggcagacggccgagcatccgttcgataccttgcccgaagagatagccgagcgccgtgaacagctgtccccatatgagagccgcgaccgcgttcagcaccacgaactttccggtcgaaatgcgcgtcgtgccgatcacgatggggctgatcgttctcaggccgacgagaaagcggaacgcgaggatgaaacctgtcgggtaacgctcgagaagggacgtgacctgcgtcagcgtcggcgtctcggtcaacttgcggacgacgcgccagcgcaccgcatagcggccggcgaagaaccagatctggtcgccggcgaatgaacccgccgaggccatcagcgaggccgacaaataagagatcagcccgcgatgggagatgataccgccgagaaaggccgcggtttctccctcgattgccgtgccaaggaagatcgcgacgatcccatagtgttcgatcagctgctctatggacacgattgacacctcggcattttcggcccgccgccgcgaaggctacacgctcttcaggtcgccgagcaatgtcgggatcaattcggagaccgtcgggtggatcggcacggcccatttgagttcgggataggtcgtcttcgcgttcatggcgtcgatgaagccatggatcgcctcgtcgccctcaatgccgaggatcgccgcgccgagaatctgcttgctttgcgcatcggcgatcaccttcatgaagccctttgtctcgccccgctccttggcgcggccgaccctggtcatcggccgggtcgagatcatgatctcgtggccggatgcgcgggcctgcctttccgacatgcccacgcgaccgagcggcggatcgatgtagagcgcataggcaaggatacggtcgctgagcttgcgatcctcgccgtcgagcaggttcgcggccgcgatctcgaagtcgttgtaggacgtatgcgtgaaggcgccgtggccattgcagtccccgagcgcccatatgccatcgacattggtcgccagcttgtcgtcaaccgtgatgtagcctcgcttgtcggtagcgaccttggctcgttcaaggccgagatcatcggtgttcggcacgcggccggttgcgaccagtacatggctcgcggtgatgtcggcgataccatcgccgaccgcgaccacgatcccatcggaactgtttttgaaggcgatgcgatcggcgctggtgtggaccgcaattccttccgcgcgcagaatgtcggcgatcgcgtccgagatgtcgtcatcctcgcgcgaggcgagcttggggccgcgctcgatgaccgttacctccgcgccgaagcggcgatacatctgggcgaactcaaggccgatatagcttccgccgatgatcaccagatgccggggcagtgtgtccatcgcaatgatcgatgtgctggtcaggtaatcgatgtcgccgatacccggcatatccggaatggccggtcgggcgccgacgttgagatagatgcgcggcgcggtcagcaattcgccgttaacggtgatcgtccgctcgttttcgaagcgggcatgaccgtagatcacggtgatgccgtccatgttggcaaaccacgagagcagaccattgcgggcctccatgataactgtctcggctcgtttgcggacgatttccatgtcgacgccgatctcgccagggatggtcaccccgtagccgccggcattgcgcgcgacatgggcggcgcgggcgctggcgacgagcgttttcgtcggcatgcagcccgcgttgacgcatgttccgccgagaaacttgcgttcgatgagcgcgaccttcatgcccctctccgccatccgggcggcgagaaaggggccggactggccggcgccgacaacgattgcgtcgaagctgcgcatcagaccgcagccacgatcaggatcgcgccgacaatggcgaccgcgtcctcgatgattgcggccggcggatctctctgaaaggcgccagccagcctggcgcgcgccgcggcgccaccaagcgtgcccgcaaccgcgccgagaatgccggcggcgagcgccgcgatcatcgagccgccggcggcgccgatggtggcacctgacagcgcgcccatgatcaaccgcgcgccgaactgcatgggcaccttgcgggaaggggtggatggcaactgatcggtcaccagttcgaccagcgccagcagcgtgaatatccatggggtccagcggtaacccatgaaggccagcggtgtctgggacacatcgaaccagccgagcgccgcgccccatgcgacggccgcgggcgctgtcagcgcgcgcagcccggcgatgatgccgatcagaaatgcgagaaacagaagcatgcgcaatcccccatcgcagcgcaggctatccccgcggtgaagcaaggcttgcacattgtcggttcggttgcaatttgacggcgaaggatttctctcagttcgagaacgccgctatccccgttatggcgcgaccgaggatcagggcgtgaatgtcgtgcgtgccttcataggtgttgaccacctcgagattaacgagatgccgcgcgacgccgaactcatcggaaatgccgttgccgccaagcatgtcgcgtgccattcgggcgatgtcgagtgccttgccgcaggagttgcgtttcaaaatcgaggtaagctcgaccggcgggtggccgtcctccttcatccggccgagacgcaggcagccctgcaggccaagggtgatctcggtcgccatgtcggcgagcttcttctggatcaactgattggcggcgagcggtcgattgaactgtttccggtcgagcgtgtattgccgcgccttcgcgtagcaatcctcggcggcgccgagcgcaccccatgcgatgccaaaacgggccgagttgaggcaggtgaacggacccttcaggccggagacatcgggcaacaggttctcttccggcacgaagacgccgtccatgaccacttcgccggtgatcgaggcgcgcagaccgactttgccgtgaatggctggcgctgtcaggcccttccagcccttttcgaggatgaagccgcggatgacgccatcctcggtctttgcccagaccacgaagacatcggcgatcggcgcgttcgatatccacgtcttggcgccggaaagactatagccgccgtcgaccttccttgcgcgcgtcgccatcgatcccggatcggagccatggttcggctcggtgaggccgaagcagccgatccattcgccggtggcgagtttcggcagatacttctgcttctgcgcttccgatccgaaggcatcgatcggtaccattaccagcgatgactgtacgctcatcatcgatcgatagccgctgtcgacgcgttcgacctcgcgggcaatcagcccgtaggcaacgtatccgaggcccgcgccgccgtattcgggtgatatcgtcgggccgagcagaccgagttcgcccatttcgcgaaagatatgcggatcggtcttctcatggcgaaaggcttcgagcacacgcggcgcgagcttgccttgcgcgtaggagtgcgcggtgtcgagcaccatgcgctcttcgtccgtcagttgctcgacgagccggaacggatcggaccagtcgaaactctcgcgggtgtgctgcatggttcatcctcctcgatccatcggcattcagcggaccctattgggataccgccggggcgagggagcgtcaacacgcgccgccgtctgcgttgctctcgactgtgcgcgttcatgacatagctattcctcatgggatcgtctcgataatgggagcaggacatggcaaagatcgcgtttatcggcctcggcaacatgggtgggccgatggcggcaaatctggtcaaggcgggccacgcggtcgctggctttgacctggtgccggcattgcttgaggcggccgaagcgacgggcgtgaagccggcaagcgatatctctcaggccgtgagcggcgccgacgttgtcgtgaccatgcttccgcagggcaggcacgtgctggcggcgtggaccgatattctcggcgccattccctcgggaacgcttgtcatcgactgctcgacgatcgacgtcgccagcgcgcgcgaggcgcatgatatggcaaggacggccggttgcccgtcactcgatgcacccgtctcgggcggaaccagcggggcggcggccggaacgctcaccttcatggcgggaggaacgccggagagtttcgccagggcgaagcctgttcttgaagcgatgggccggaagatcgttcattgcggcgaggcaggcgcggggcaggcggcgaagatctgcaacaacatgatcctcggcatatcgatgatcggcgtttgcgaggctttcgcgctgggcgaaaagctcggcctctcgcaccaggccctgttcgatgtcgcctcgacgtcatcgggccaatgctggtcgatcaacacctactgcccggttcccggtccggtgccgacatcgcccgccaacaatgattataaacccggctttgcggccgccttgatgctgaaggacctccggctgtcgcaggaggctgccctcgcaaccggcgcctcgacgccgctcggcgccgaagccgcgcagttgttcgcgctcttcgaaaagcagggcaatggcggtcgcgacttctcggcgatcatcgagatgttgcgcggctgacgccgtctttacggcaaacgcaggtttgtgccgccaacccaggcggttgagatgttgggcttcgaggcggtgttgataatcttctgcaggatctgttcgccgctatcgaactcatcgaacaagcgcaccgatcccttcggcgccttggtgtcgataacgatcgcatcgaagagatagccgggcgtgaactggccgatcggcagatcgagcgccacgccgccccctgctgttgcgatatagaaggcgtcgcgaaaatcgatctgggccggcccgtagctcgcgcgcgcctcagcgtcgcgattgggatcgacaccgctttccagcgcccgcgacataaggatcgcgccgcggcagttttccagcatcgaggcgctcggtccgccagagatatccgtgccgaggccaacgtggacgcctttgtcgagggcggccttgagcgggaagacggcattggcgaaatagacgttggagagcgggcagtgggcgaccgccgcttcgcgctcccgcaccttgtccatgtcgtcatccgtcaggaagttggcatgcgccagcaccgtgcgtcgaccaagcaggccgaagcggtcgagcgcttcggtatcggtcacgccatagcgcgacagcacgtaaccatgcgcccaatcgctctccgaacagtgggtctgcacgtggcagccgcactccctggccagagcacccagcccttcgagcgttgcgtcggtgcaggatggaacgaagcgcggcgtgatgacgggaagcacccgcttctcgccattctcggggtgggtattgatgtaatcgatcagcgtccgcgtgccttcaatggcgtcatccggcgttgcgtcacggtaataatccgggcactcgtcggcattgtccatcgccaccttgccgatcagcgcccgctggcccttctccaggcaaatgtcggcgagcgatcgcgtcgcatcctggtgcacggtggcgaaatagagcgccgtggtcgtgccattggcgagcatatcgtcgacaagcaggccatagctgcgcttggcgaaggcgagatcttggtagcgggcttccagcgggaaggtatatttctgcagccatacttcgagcggcacatcgagcgcactaccaagctggggatattgcggagcatggacgtgaaggtcgacgaaaccaggaagaagataggaaccaacgggcagcgtgaccagttcgccgctttcctcacgcgcctcacgaatggtccggtagttcggatcgctcggacgatgcatggcggcgatcgtgccgtccgcgccgatatcgatcagcacctcgtccaagatatcgatctttccgcgctccggtgcgtgaaatccggaggcgcagagcgttttattccgcaggtccaatgctgtattcccagttcaagcgatgcgtcggtattcgcgcacgtatacgcgaatacaaatctatagcgaataaccggccggtccattccccgagccgtgcgttttttgggtggctgccgtgcattcgcgggacgctcgacacgattgatggccgggcggcgcgccgcgtggcctatcgcgaaagaaggtgccggccggcatgttgaagcagccacgccctgaccttggcgaccgattgggcttgcctcggcttgcgcagcgagacgacgtaaaagtccgactgcgcgtgcattgtttccttgaatgccggcaccagtcgtccggcggcgatatcttcgttgacgaataccccgcttgccagtgcgatcccctggcctgcgagggcggcctcgatcgcatgggacgtctggttgaagcgaacgcccttggaggccgcaatcggcctttcacccgcgatcgtggcgatgaactcgggccattgattgtgggtgtcgtggagcagcacgaaacgcgcgagatcgacagggtcgaggccgtcggccgtcggcatcagtgccgggctgcacaccgcgacgagctcctgctcgaaaagcagatcggcctccagcgacgccggaaagggcggccgcgccagacggacggcgatatccacgtcatccgattggaaattggccacgcgctcgctggcgagaatgcgcatgtcgagatccgggtgcgcggccagaaagtccggcagcctcgggatcagccatttcgacgcgaaggtcggcgtgacgctgatcgtcagccgcaacggctccggccgcaatgtcacggtggcatcggagatcagttcgaaggcgcggcggatgctttcggcatacccgcgtccggcctcggtcagggcaagcgtgcgggggaggcgttcgaacaaagcgaggttcaattccttctcaaggccgcgaacctgctgggccacggccgcctgggtgacgcccagctcctcggcggcgacgcgaaaattcagatggcgggcggctacctcgaaagcgcgcaggccattcagcggcggaaggcggaaaagcgggtctttcatgcgatagattttctactgaatgatgccaatcgaattggctcgaagctatgtcttcctgatggtatcatctcgcatcagagctgaaaacatgcgcgatgaacaagaaaaatgacgaaagggtggatgtcatgacagtagaaaaagtggcattggtgacggcaggcggcagcggcatgggggcggatgccgccaaacgtctggcggccgatggcttcaagctcgccatcctatcctcttcgggtaagggtgaggcgctggccaaggaactgggtggcgtgggtgtcacgggttcaaaccagtcgaacgacgatatcaggcgacttgtggatctggccatgcaggcctggggtcgcatcgatgtgctggtcaacagcgccgggcacggcccgcgcgcaccgatcctcgatatcaccgacgaggactggcacaagggcatggacgtctacctgatgaacgtcatccgcccgacgcggatcgtgacgccgatcatgcaggcgcagaagtcgggcgcgatcgtcaatatctcgaccgcctgggccttcgagccgtctgccatgtttccaacatcggcggtcttccgcgccggtctcgcgtccttcaccaagatcttcgccgacacctacgcggcggacaatatccgcatgaacaacgttctgccgggctggatcgacagtctgccggcaaccgaggagcgccgcgaatcggtgccgatgaagcgctatggcacgagcgaagagatcgcggcgaccgtcgcgtttctggcgtcggaaggtgccggatatatcacagggcagaacatcaaggtggacggcgggctcggtcgatcggtttgatcgcgcaggccaaattttgccagatcaagcggctggttcgcgggccgcttgataaacatcacttagaagatcgccgatagagattacctatcgaaatatttttctttatctatttcatttatcgccggcccctgtttatgttgcgccgcgaaagcgggttttcgcttcgcagcaattttacaggagccttcatgtcccttatcaacacatccattaagcccttcaaggcgcaggccttcaagcagggcaaattcattgaagtgaccgatgccgacaccaagggcaagtgggcggtattcttcttttatccggctgactttaccttcgtttgcccgaccgaactcggcgatgtcgccgatcactatgccgagctgcagcgccttgacgtcgaggtctattcggtctcgaccgacacgcacttcacccacaaggcttggcacgacagctccgagacaatcggcaagatccagtacacgatgatcggcgacccgacgggcacgatcagccgcaacttcgaagtcatgcgcgaatccgaaggccttgccgatcgcggcactttcgtcgtcgatcccgatggcgtcatccaggcgatggaagtcaccgccgaaggcatcggccgcaatgccgtcgacctgctgcgtcgcatcaaggcagctcagtatgtgcgcgcgcatccgggtgaagtttgcccggccaagtgggaagagggcgaaaagacgctcgctccgtcgctgcacctcgtcggcaagatctgacgttcaaatgacaagccgccttccggtgaatgccggagggcggcagccaatgccatattcagcgccccagtggcgcggccatccatttttagcggagtgccccatgctcgacgagaacctgaagtcccagttgaagggctatctggagagggtcgttcgcccgatcgcgatcactgcttcggtcaatgacagcacaaagtccaaagagatgtcggagcttctcggcgaactggtcgcgctttccgacaagatctcggtcgtggaaacgcgcgatgacggagagcgtgcaccctcctttacgttgaccagcccgggccacgacatcaatctgcgtttcgccggcattccgatgggccacgagttcacctcgcttgtgctggctctgctgcaggtcggcggccacccgccgcgcaccgagcaggcgatcatcgatcagatcaaggatctcgacggcgatttcctcttcgagacctatttctcgctcacctgccagaattgccccgatgtcgtgcaggcgctgaacctgatggccgtgttgaacccgcgcgtgaagcatgtggcgatcgatggcggcgtgtttccggccgaggttcaaagccgccaggtcatgtcggtcccgacggtctatctcaatggccagctgttcggtcaggggagaatggaggtcgaggagatcgtctcgaagctcgacaccaattccgcggcccgcgccgcggaaaagctcaacagccgcgaagcctatgacgttctcgtcatcggtggcgggccggctggcgctgcggcagcaatctacgccgcgcgcaagggcatccgcacaggcgttgccgccgagcgcttcggcggtcaggtgctcgacacgatggcgatcgaaaacttcatctccgtccagcacaccgagggtccgcagttcgcggcctcgctggaagcgcatgtgaagcaatacgacgtcgatatcatgaacctgcagcgtgctgagaagctcgttcccggcaaggacatgatcgcggtcgagcttgccaacggcgcgacactgcgctcgaagacggtgatcctgtccaccggcgcgcgctggcggcagatgggcgttcccggcgaagaccagtatcgcaacaagggcgttgcctattgcccgcactgcgacggtccgctgttcaagggcaagcgcgttgccgtcatcggcggtggcaattccggcgtcgaggcggcgatcgatcttgccaacatcgtcagccatgtgacgctgatcgagttcgacaacaagctgcgtgccgacgacgttctgcaacgcaagctgcgcagccttccgaatgtcgatatcctgctctccgccaagacgacggaagtgctgggcgatggccagaaggtgaccgggctcgtctacgaaaatcgcgttgccggtcagcggcacacgctcggtctggaagggatcttcgttcagatcggtctgcttccgaacaccgaatggctgaagggtgccgtcgagctttctccgcgcggcgagatcatcgtcgatcatcatggccagacctcggttcccggcgtctttgccgccggcgattgcaccacggtgccttacaagcagatcgtgattgcgctcggcgagggcgcgaaggcatcgcttgcggccttcgatcacctgatccgcacatccgcgcccgacgaggatgcagtgaaggcggcctgaagccggccgacacggtcctgcaatgacgctgcgcgagctggaatacctgattgccttggcggaccaccggcattttggccgggccgccgaagcgtgcctggtcagccagccgacgttatcgacgcagatccggaaactggaggagacgctaggcgctcctctgatcgagcgcacgccgcgcaccatcatgctgacgccgttcggcgaggataccgtcgaacgggcgcggcgcatcatgcgggaggtcgccgagatcagatcctcggcgctgcgcagcctcaatccagaggtcggcacgctgcgtctcggcatcttcccgacactggcaccttatttcctgccttatgcggtgccgcgcatccacaggcagttcccgcggctcgagacgctgctgatcgaggaaaaaagtgacgcgctcctcgcgcgcctcagaagcggcaatctcgatgccgcgatcctcgctcttcccgtcaacgacgatcacctgaaggccgagtttctcttcgaggaagactttctgcttgccgttcccggcacgcatccgctcgcaagacggcagtcgctggtgcttggggacctcgatcgctacgaccttatgctactcgaagaggggcattgccttcgtgatcaggcgctcgatgtgtgccgcttatcgggtgcgagcgagcgcacctcgtttcgcgccaccagcctggagacgctgcgccagatggtcggcgccaatgtggggatcacgcttctgccggagctcgccgcgctgcatccggcgtccggtgatatcaggctgcttcgtttcgaaggcatatcgccgaacagacggatcggcatctgctggcgcacgggttcggcgatgggcgcttttctggaaagtatcgctggtctcctgcgcgacgttgcccaggagctgcttgccgacatcagccgttcgcctgccacctaaggcgactttacttccactcccacaggagcttggttgaaaacggccgtgtatcgatcaatagctcgggttgcgtcaacttggcttcgaaagtcgtggcatcagcgtcgccattcagcccgacaaagagcatcttcatcgaagcgccgcgcggctggcctttctttcggtaggagaactggaccgcgcaggtgggatattcccatcccgccgtcagcgtctccgcgaacgcttcctcgccgagcccgttcgcccggcccgtcgacgccaggaactggcctagtccgaagaagccggaaaacacccggtacgccgtctcctgcgacatctgcgtgccttggccgctcgccgtgtcgcgccgataaaacaggctgtcgacctggccctgcttgcggctcatggcgtagctgatgaggttcttctgggccagcagctccatcgccagatcgtaggtctgataggaggcggggtcgctatgcagatcgtccaagcgtgccttcagatcgacaacgtaatcacgataaaatgcggcgctcatcggcgtttcctcatggcttttggcgcgtggtagcagaaaacgcggagattccaaggggtagtacgacctgcgccgcaacggccacgaggcgcaaatctgcgacagaagccgcgcgccacgcgcatagcgcatagctgcgctgcagaattgtgcctatgatttgagcgtgcttgctgtataaacaaatcatcgaagcgatgcacctcctcccgcagagcttcgaattgcaggtggccttatcctcctcccaagggcgcctgcgggaatgacagcactcctcctcccagctgtcattcggttattttcgaaaagcctgtcgcacctcctcccgcggcaggctttttcgattctggcctgcgcgttcttcagctttcagttttccggatcacacggtagcgccagcgcgcaaaccattcggcttgcgcgcctttcgttcaagcaagcgtcagctgatgccgccgaggcatacgtatttgatctcggtgaattcctcgatgccgtatcgcgagccctcgcggccgagacccgagagcttcacgccaccgaacggcgcttccgccgtcgagatcaagcccgtattcacgccgaccatcccatattccagcgcttccgccacacggaacacgcgcgcgaggtcctttgcgtaaaaataggaggcgaggccgaattcggtgtcgtttgcctgttcgatcacatccgcctcgtccttgaagcggaagaggggagcaagcgggccgaaagtctcttcccgcgccaccgccatgtccctggtgacgttggcgagaacggtggcctcatagaaggtgccgcccagcgcatgtggcttgccgccgcggatgatgttggcgcccttggcaagcgcgtcggcgacatgttcctgcactttctcgagcgccagcttgtcgatcagcggcccgaggatcacgccctcgtcgaagccattgccggtcttcagcctgccgacggcttccgcgagtttttcggagaaggcgtcatagacgccatcctgcacataaagcctgttggcgcacacgcatgtctggccgttgttgcggaacttggcgatcagcgcgccctcgacggtggcgtcgagatcagcgtcgtcgaagacgatgaacggcgcattgccgccgagttccagcccgagcttcttgatcgtcggcgcgctctgcttgtagagctcggcgccgatttcggtcgacccggtaaaggtgagcttgcgcacggtcgggttcgaggtcatctccgcgccgatcgcggcggcggaccccgtcagcaccgagaaaagcccagccggcagcccggcgcgctccgcgagcacggcaatggcgatcgccgagaacggcgtctgtgatgccggcttcagcaccatggcgcaacctgccgccagtgcggggccggccttgcgggtgatcatcgcgttggggaaattccagggcgtgatcgcggcgaccacgccgatcggctgcttcatcaccatgatgcgcttgtcgggctggtggcccggaatgaggtcgccatagacgcgccgtgcttcctccgcgaaccattcgatgaagcttgcgccgtagacgatctcgccggtcgcttcggcaagcggctttccctgctcaagcgtcaggatgcgcccgaggtcgtccttgttctcgatcatcaggtcgaaccacttgcgcaggatgccggcacgctccttcgccgtgcgggcggcccagcccttctgcgcgacacgcgcggcctcgatcgcggcctttgtctccgcgccgccgagcttgggcacgcgcccgatgatctctccggttgccggattgttcacctcgattgcattggcggggtcggcgtcggtccattttcctccgacgagggcggcttggcgaaaaagggaagggtctttcagctgcatcgcattcatcctgtttgacaagccgccggcactgatcgggtcagcgttttctggtgctgaggataaactggtctcccgtccggcaacgtcaaattggccgaattgccgaggacttgcaaccgaagccgccgacggtcttgcatggtgtcggtatcgcacggacggaaggccgttttagggatgtcttgactgcgcgcggcaaacgaaatggtatgcgtcctgatatcaccctacggcggtgccgccggcgcggcaccgggagcaaatgatcgcgatcaggcggcgcagcatcggtgtattcgtggcttggggcttccgcgccgccctttgcacgacgctgaccggcatcgccagcgcggccgagatcatcgaagccgcgccgccagcggcctgcctctatacgcgctcgatcaccggttcggcggagacgctctgcattcgcaaggacagcttcaaccgcgatctctgcggtgcgatcgagcggaccgcgacggagcacgacctgccgccggatttcttcgctcggttaatctggcgcgagagccggttcaggccggacgccctgagctacaagggtgcgcagggcatcgcccagttcatgccgggcaccgccaagctgcgtggcctgcaggacagctatgatgtcttggaagccttgcagaagtcggccgaatatctcgatgaactcagggatcgcttcggcaatctcggccttgcggcggcagcctacaatgccggcgaaaacgggctgtcgaacttcctcaatggcggcggcctgccgacggaaacccgcagttacgtgatggcgataactgcgcatagcgtcgaggagtggaagtcctcggtacccgaaaaggcggcgggtcccctggcggaggaccagccgttcatcgagggctgcgtggcgcttgccgatcgccgcaagatggccgaaccagcatggcggtctgaaggaaactgggcgccctggggcgtgcagatcgcggcgagcgccaaccccgacgtcgcccgtcgcctgttcttcgaggcggttgcccggtttcccgcgccgctcgaccaggagcagccgctgatcctccggcagcgcgaccgcagcttcggttttcggccgcgctatgtgacgcgtatcgcgcggcagacgagggcggaagccaatgacgtctgcaagcagatccgccagaaaaacccgatctgcctggttttcaagaattgagatgttgcggtcagtgacattgggatgtgccgcgagcagtcgcggccattcggagatttaaattgcacgggtgtgcaaaaaatgaaatccggccctattttgtcatgtcactgttacgcgtcggcgatagcaaaaccacagtccagagggcagagccccaaaccgaatggagacggtcatgaacagacgcgagtttcttgtcacatcatcggcggcagccggtgtgctggccctgccacgcttcgcaatggctgcggatgcgacgattaacctctacagcggctctgacgccaacatcatcgatttctggaacaacaccgtgcgtccggccttcgaaaaggccaatccgggtcttgccctcaagatcaccgatgccggcgacaacacgggattgcgtgcgattgcagaccgtgcgctggccgcgctgaaatcgaaggccgatccgcagtcggacatcttcgaacacttcgatccgcgtctgcctgccggcggtatcgacgccggcctctgggtgaagttctcggccgacaacatcgatggcttcgcgaacgtcaatccgctgagcgtcgacagcgaatattcgctgccttaccgcggttcgcaggtgctgctcgcctacgacaagacgaagctcgaccccaaggatgcgccgaagacctgggaacagctgacggcctggatcaaggccaatcctggccagttcatctacaaccgcccggacaagggtggttccggcggaaacttcgttcgccgcgcgattcacgaggccaatggccgtgatcccaagaagttcaccaccgataactacacagccgaactcggcaacaagatgctgaccccggcctgggcgatcctcaacgatctcgcgccgtcgctttatgaaaagggcgcctacaccgccggcaacacgcagtcgatccagctacttgcccagggtgtcgtcacgatgacgccggtgtggtccgaccaggtgctccaggccctttcgcagggtgttctgccggaaaccaccggcctggtgcagttgagcgacctggcgctttgcggcggcttctcgcgcatgaccgtgttctcgaacggcgccaacaaggatgccgctctcaagctcgcggcattcatgctgacgaaggagatccaggaagcgatcatcaccgaaatcggcggcttccctggcgtttcctgggatcatatctccgacgagctccgtcagaaatacgccgacgtcatcccgaccacgatcccgacattcccgtccggcgattgggaaaccaacatcaacgatggctggtaccgcaacgttgctccgggcatcagccgtacctgatgcgtagaggcatgacattgccgctgccggcgcggggaaccgcgccgggcaaggcgcaaaatccggtgggacttcttctggtcgccctgccggtgttcctgctcggatggctgatcgtctacccgatcttctcggccgtcatcaccaccgttttcgtccgccaggcggatgggacgatgtcggtatcgctggcctcctatgcgtttttcttcagcgattcctacagtcgtgccaatctctggataaccctgtggacgacctttgtctgcggcgtcttgctgctggtcatcgggttgccgatcgcgctctatctgcgcttttcgcaggggcgccttcccgcctatgtgcagggactggcgattttcccgatgttcgtgccatcgatcatcctgtcctatgcgctgatccggacaatcgggcccaacggcaccgtcgatctgctgctgaatgcggtcgggctgccgaagctgccgtcgccctatctgacgccatggggtcccgtcatcggcctggtatgggacaatcttccgctaaccgtgctgatgctgacagccggacttggtaacattcccacgagttccgtcgaggccgcgcgcgatgtcggcgcgtcaccgctcagggttttcgtgtcgatcatcctgccgcgcatgggcaattccttgctggtcacggcctccttcgccatccttggcatcttctcgtccttcacgttgccatatgtgctcgggccggcatcgccggaaatgatgggaccgttcatgcagcgtaccttctcggatctcaacgatccccagaatgcattgacgcaggctgtcatcgcgttcggcttctgcctgattttcgggatattgtatgtgcgttccatcgccaaaaatcggggggcgtcacgatgagagtatcgagcaccgtcaagggttccggcatcgattggacgggcattgtcttcgccgtgcttctcaccctgttcatcgccgtgccgctgatcgtggtcggcacctgggcgttcacggaggtgtggcgctacccatcggtcgttccgcagcagttcggtttgcgtttctggtcgcagacgctgtcgcgctcggatgtgtgggatgcgctcttcctgagcctgaggctgaccacgacggtcacgcttctgtccgccatcatctgcctgccggcggcttacgctttcgcgcgcatgtcgtttcccggaaagaacgtgctgttcctgtcgtttttgtcatcctacgcttttccgaagttcggcctgctggtggcgatcgccggcatcttcctgaagctcgggctgatcagcaccttctggggcgtggtcctgatccagctggtcgggacgctgatgctgatgatctggattcccgtggcggcgttccagaatatcgatcgccggatggaggaggctgctcgcgatgcgggcgccgggccgctgcgggtgttctggtcgatcacgctgccgcaggcggcaccgacgatcgtcgccgcattgctgctgaccttcgtcggcacattctatgaaaccgaaggcgcttggctgatcggcgcgcccgagatacgcaccatgccggtgttgatgatcacgttcatcaacaaccagatcgtcgtgcagtatggcgccgttctgtcggtgatgctctgggtgccatcattcatcgcgctgatgtttgcccgccgggtcgtcggaacgggttcttttgcgcgtggcttcggcgcgtgacgttgggatcgggctctgcccgaggaaaggcttgatatggcacgcttgacgatcaggaacgtctccaagacgttcggcacttcgttcgcggtccgtgacttctcgctcgatgtggaggatggcgaactcgtctgcctgctcggtccgtccggatcaggaaagtcgacgctgcttcgcatgatcggcggcttcgagcagccgactggtggctcgatcctgatcgatgccaaggacgtgacggcactgccgccggaaaagcgccccacgggcatggtcttccagagccatgcgctgtggacccatatggacgtgttcaacaacatcgccttcggtctcaagcttcgtcggctggcaaagaacgaaatccgcgaacgtgtcgaaaacgctctggcgctggtcggtcttgccgattacggccgacgcatgacgacgcaattgtcgggcggtcagcagcagcgcgtggcgctcgcccggtcgctggtcctggaaccgaagatcctcttgctcgacgagccattcgccagcctcgaccagcacttgcgggagcggctgcgcgaggaagtgcgcgatatccagcagcgggtcggcatcaccaccctgttcgtcacccacgggcaggacgaggccctggcgctcgccgaccgcattgtcgtgatgcgcgacggcagcaccgaacagatcgcgccgcccgatatcgtctaccgggaaccgcaaacggaattcgtggcaggcttcatcggctcgatgaatttcgtcaggaccagcatccgcggcggtattagccagcatccggcctttcccgtggccgtgccgatcgaggatggtgatgtcgttctcgcgtttcgccccgaggcgctgtcgctgcagccgtcgaagacgctttcgaccgccatcgttcatcgcagcatcgatttcggcacccacaagatcgtggacatcgacctcgccgatggtacgcgcttgaaggcgatgaccgcgccggatagcaattggagcaagggcgtgggcatcgagccgagggcctccgcgttccgtgccttccgcgacaaccggctggtctatcaatcgacaacctcaggcgaacggcatcatgatcgaatccttggcaacgcttgatcgcagcggcatcgcgatcgatcaggcaggccacaagacctggctgaaatggcatcgcggccatcgctatgccggtgatatctcgtttacggggcaacgcattgccgaggcgatggcgctgggcgccagcgtcgagatcgatctggtgcgtttcaatggcgccggcttcgccgtgttgcatgacgagacactgaacatggcgacaacgggcgaggggcgcgtcatcaaggcgacggagagcgagttgcgcgcgcttcgtttgcgcgacccttttggcgagccgacggcccataagatcatgctgatcgatgatctcggtcatctcctgcaagggatcgaccgcgagggcggcgccgttctgcagctcgatctcaaggaagattcccctgccatccgcgatgaggatatcgcggccttcgccgcggcgatctcgccggtcgcgcagtctgtcattctctcggcgggggatcccgaggccgtggaacgcctgtccctgagcgtgccggagatgccgattggctacgacccgtgccatcacggcgcgatcgagcggctgaaggaaagtcgtgacttcgacggcttcgttgccgatgccgtggcggcgtcgccgcgagcgcggatgatctacctgcatcaccaattggtactgtttgccgaggacgccggatacgacctagtggcggccttccatcgcgccgggcgcagtatcgacgcctacaccatcaattcggcaatcccggccgcactgcctgtcgtgcgccgcctcctggcgctgaaggtcgaccagatcaccaccgatgacccggtcggcctggaaacactgctcctcggctaggcctgctcggcttcaaatccttgaacgagccaggggtggagcgcggtgttggcggcgagaatgtcgccgttcgccgtcacgtcgccacccttgaaggccgagaccttgccgcctgcctcggtcaccagcaacgcggccgcgccgtagtcatgcggcgatagcccgtcctcaaagaaaccgtccagacggccgcttgcgacataagcgatcgacaatgccgccgagcccagacgtcgcacgccggcggtgttgcccatcagcctcttcagcgcatggaaatagacctccggtgcaacggccttgacctgaccgggaacgggcagaccggcgccgacgacgacgttttcgatatcggcgttatcgacgcaggagatgcgctcgccgttgagatatgcgccgccgccgagctccgcgctgaacagctcgtccagcatggggtcgtagaccacgccggcaacgatccgcccgccttcggcgatcgcgatggtcatgccgaaatgcggaatgccccaggcgaagttggtcgttccgtcgatcgggtcgatgtagatgatgggcgcgtccgttcccgccacccggttgccgacatcttcctcacccttgatggaataggaggggaatgccgcgatcatatccgtgacgatgatgcgctcgacggcaacatcgatctccgtctggtagtcacgcggcgcctttgacaccacatcgctgatgcgccgacgctgcaaggaacggcgcgccgtttcgccggctttcacgaccgtcgaggcgagagtgatcaggcgctgggaggctgtcggcgaaaggcgtgaggatatgggagaggatgtcatcaggaacccggataatgaaactgcaatacggccggaacgcatggcagagctgcatgacgctttcgtgacgtgtatacggcttttcgaggatcacgccacgcggttgcgcgaccctggtttgctttttaaccacatggtcaattcaatgcgagccgcagtgcgtcatggcccgcctgcaacgggtacgacgcgccatgcgtctaagggcgctgcgcggctgcgcgttcggtctcgccctcacgtgtgccgatgagcagatcccgcgcatccgacaaggttgtggcgatcgaacgcggctttagcgaatagaacacggattgcgaggcgcgccgcgtcgagacgaattcgcatgccctcaggatggcgaggtgctgcgaaagcgccgattggccgaggccgagcttcttggcgagcacattgacctggatctcgccctcggcgaggttggtcaggatggcgagccggttggcgtttccgagaaccgcgagttgatccgccagagcggcaatgccctgcgggttccgattgtcttcctgcatatgattttcccaatgaaataagcgggaaaacgccgcccacgatgtgacgcggtccgtcgtcccaggatgtttaagtacgaaacgtaacgactagcccgacgcggcgggcagtcgctggagggtcgacggatgaatggattggaagccaatgtggaagccgacggaacaaggccgtggcggcaacagcgcattttccgccatatggggcggctggccatgctgtgatggaatagtggacatcatgttcacccggttgaagttaccctgccacaatcgttcacagtgttgaaaagatggttaacgacaggccttcaagcctatgaaaaatttggcttaccgatgtcatcagtggttgcgttccgctcacggtttccgttcggtgcgttggtggcgagccatcaaaagcgcgcggttgtcgatcgaaggtaatattttttttgctgaagtacggtatctgcgctgatggccttggttgacgcgcacgaaagctgtaagacctcggctgatgaacactgccgttcggtggcgctgcgcgtcggcgccccatagaccatgacgttgggattgcgatgaacctttacctggaatacctggccgagatcaaaagcagagaaactcaagggctcgcccccaagccgatcgatgacggcgcgctgactggcgaaatcattgccctgatcgaggatgccggtagcgaataccgcgccgatgctttgaaattcttcatctacaacacgctgccgggcacgacgagtgctgccggcgtcaaggccgccttcctcaagaagatcattcttggagacgtcatcgtccctgaaattacgccgaaattcgccctcgagttgctgtcgcacatgaagggcggcccttcggtcgaagtgctgctcgacgtagcactcggcagtgacgccgagattgcctgtcaggccggcgacgtgctgaagacccaggtcttcctctacgacgccgacatgttccgcctgcgcgatgcctacaaggccggcaatgccgttgccaaggacgttctcgagagctacgccaaggcggagttcttcaccaagcttcccgatgtcgacgacgagatcaaggttgtgaccttcatcgccgccgaaggcgacatctcgaccgaccttctttctcccggcaaccaggcgcattcgcgctccgaccgtgagctgcacggccagtgcatgatcacgcccgaggcgcaggccgagatcgtcgcgcttcagaagcagcacccggacaagcgggtgatgatgatcgccgaaaagggcacgatgggcgtcggctcctcgcgcatgtccggcgtcaacaatgtggctttgtggaccggcaagcaggccagcccctacgttcccttcgtcaacttcgcgccagtcgtcgccggcaccaacggcatctcgccgatcttcgcgaccaccgtcgacgtcaccggcggcatcggcctcaacctgaagaactgggtcaagaagctcgacgaaaacggcaagccgatcctcaacaacgaaggtaacccgatcctcgaccagaagttctcggtcgaaaccggcaccgtgctgaagatcgacgcgaagaacaagaagctgcgcgacgaagccggcaacgaactggtcgatgttgcgtcgtccttcacgcctcagaagatggagttcatgaaggccggctcgtcctacgccatcgtcttcggcaagaagctccagacctttgccgcgcagacgctcggtgtcgaagcaacaccggtcttcgcgccgaacaaggaaatcgccatcgatggccagggcctgaccgcggtcgagaagatcttcaaccgcaacgcggtcggcgtcacgcctggcaaggtgctgcatgccggctccgacgttcgcgtcaaggtcaacatcgtcggctcccaggacaccaccggcctgatgaccgcgcaggaactggaagcaatggcggccaccgtcatctcgccgctggtcgatggcgcctatcagtccggctgccacacggcatccgtctgggacaagaaggcccaggccaacattccgaagctcatgtccttcatgaacaacttcggcgtcatcaccgcccgcgatccgaagggcgtctatcactcgatgaccgacgtcatccacaaggtgctgaacgacatcaccgtggatgactgggacatcatcatcggaggcgacagccatacccgcatgtccaagggcgtagcctttggtgctgactcgggcaccgtggcgctggcgcttgccaccggcgaagccaccatgccgatcccgcagtcggtcaaggtcaccttcaagggtacgatgcagccttacatggacttccgcgacgtggtccacgccacccaggcgcagatgctcaagcagcacggcgacaacgtcttccagggccgcatcatcgaagtccacatcggcacgctgctcgccgaccaggccttcaccttcactgactggacggcagaaatgaaggccaaggcctccatctgcatttcggaagacgaaacgctgatcgagagccttgagatcgccaagtcgcgcatgcagatcatgatcgacaagggcatggataacgaggctgagacgctgaagggccttatcgccaaggccgatcgccgcatcgccgaaatccgttcgggcgagaagccggcgctgatgcctgacgacaacgcgaagtatttcgcggaagtcgtcgtcgatctcgacctcatcgacgagccgatgatcgctgacccagacgtcaacaacgccgacgtctcgcgccgctacacccacgacacgatccgcccggtctcttactatggcggcaccaagaaggtggacctcggcttcgttggctcatgcatggtgcacaagggcgacatgaagatcgtggcgcagatgctgaagaacatcgagaagaacgagggcaaggtcgagttcaaggcgccgctcgtcgtcgccgcgccgacctacaacatcatcgacgagctgaaggccgaaggcgactgggaaatcctccagaagtattcgggcttcgaattcgacgacgtgaagccgaagacatcgaaccgcaccgagtacgaaaacatcctctatctcgagcgtccgggctgcaacctgtgcatgggcaaccaggagaaggccgagaagggcgacaccgttctcgccacctcgacccgcctgttccaggggcgcgtcgttgaagatacggcggaaaagaagggcgagtcgctgctcgcctccacgccgctggtcgtgctctcggcgatcctcggccgcacgccgagcatcgaagagtatcgcgtcgccgtcgaaggcatcaacctgacgaagttcaccccgccgaagacgacgccgatcgacagccggtccgtccactactaaggcagtgatccgacaaaaacgcccctcaatgcgatccattgaggggcgttttctatttttgaacgacgttccttcgatagacgccggatgggcagccgcctttcggggccgaaacgagactatcgggctcgaattaggcagcgacggacggggacagcgaagtcgcggtcatccccagcgcctttgcaatccgcgtcacgagccgctgatctccctcatggccggactcgaccttggcaatttccgtttccgtcaaaccacaagtcacggccacttgttcgatgctgtagccagccaggtgccttgccgcgcgcaccgcttcgcccaggtcggtggtcagagatgtgggaacgttcgagtcctcgatattgccgtagtatcgtgacatgtgcgcttctccagatgcgtctactttcggacgcaatttagatgctgcgctaacaattgcaatgccattgaattcactattcgttgtatggaatagttcgctctgtagcccagtgggtctacgtcagcttgcggtcttttgagagttctgagcctgcgcaccttcggtgtgctgaagaaggaagacggcctcgccgaaaatctcccgccgccgttggtggcgaagcttgtaagcgcgctccttgtcgtccgccctgatgtcgagttgcgaggccgacgcttcgttctccaccatgtcgatcagcagattgcgcatgacggcattcatctcccggatctcctgcatttccgtcaaaatcggcgatgcgcgaagtttgcgagcgatggcctcatcaattttcttctcggcgaggcgcgttctcgccgcaagatagcgcatgacggaaaacgcgcacaaagcgatacagagcacgatgatgatcgacgtcattggcagcctcctgatgccatgtagatcgtggttcgcggcggcaatttcaatattcaccagcgatgcgtcagaaacagaacctgtctagtacatagtttgcatgggcggacgattgttcagacaatctcgcgagctctttttcgtctttgtcggccaggattccggtgcgtaccagcacggaggccagtccggcggtgttcgcgccgaggatgtcgtgctcgatgctgtctccgatgcaaatgacacgacgcggatcttctaccccggcaacgcgcagggcgtgccgatagatttctggaaacggcttgccaagccaagccactttgccgcccatttcctcgtaaagcctggcaatgcttccggctcccggggcgacccgaccctcgtgcagcttgtggatgtccgggttggtgcaatagcagggaatccggctctcggctgccggccggagcatctcgcggtactcctccatggggatgcgctcggcttcgctgccggaaatgatgatgacatcggcgtcgcgcgcggcatctatcgagagcagtcccaggcgatccgccagattgcgatcgccgccgctggaaacggtgaaacagcggcggtgtttggcgatactcgattgcgcgcgcgaaagaatttcgaacgcgacatcgcccgaagtgatgaagtgttggaaactggtcggcgcgaagccgagtttgatcagtcgttcggcgttgtattggccacttcgcccggaattcgaaaggattatgatttgcttgtttagcgctgccagctgagacaaggcggatatggcgccgtcatagggtccgacgtcatcgcggagcacgccgaactgatcgacgaagaagacatcataggctcgcgccaaggccgccagatcggcgtgaacagtatcagacatcgttgcctcgattggccagaaccagcgcggctgtccccacggcagcctcaaccgacttcgcgggcagtggctcgacgcccatcgcacgcgctctcatggttgtccataccgggttgcgcgcgccgccgccgaccgtacgcaggcttctcagctgcggtgagccaagttcgtgcagacgctggtaacccagccgttcgatgtccgtcattccctccaacagcgcctgcaggaagatggcgtcgtcggcgggccttggatcgagccttggctggtggtgcggatcgttgatcgggaaacgctctccctcccgcaagagaggataaaaccccagcccgagcggacggtccggatcgatcttacgtgtgagatggtccaggcggtcatctccgatcaaagcacgcaggacgttgccgccgctgttcgatgccccgccgaccagccagaaatcaccgacgcggtgcgagtaaattccgtactccggtgcattgatggggttcctggacgccagcttcagcacgatcgtggacccgagtgccgtcacggcgtcgccgacggcggaggcgccggtcgccagaaacgacgcgcagccatccgtggtgccggcgtgataccaagctgtttcaggcaacccaagctcgcaaagatatcctgacacgcgcgcaatcttcgcgccggcgctgtggatacaaggaagcttcgagatatccatgcccgccgcttcgatccatctcggccagtcccgcgcgtcgaggtcaaaccccgacttgagtgcgttgttctcgtcgccaggacgcccggggcatcccagtttcatgagaatccagtccgcctgatgtacgacagcgtcgacgccatgcccatgcgacagatgaatggcgcgggctaaacccgaattcgcgccgactgccgtcgcgcctgttggcgcgtgcttcgagatgcgcgcgacgatggctgcatcggggcacggctcattgtacatgagcaccgatccagtcgcttcgccggaggcgtccaacgaaaggacagtgccggaggtcccgtcaacggcgataccctcgattgcaccgagatcggttgtcgctgcgaggtgttcgatcgcctccttcaccctcagccaccagaaagccggctcgcgcaattcgtcactggacctgaacggcgcggcggcgaacgccacggtgttgccatcggcatcgatcgcggccgcgcgcgcgcccgatgtcccgatgtcgatgccgagggcagcggctcgtcgcgaatgcgcgatcacgcggtctgcctcgccgacccgcgatcgagcgcctggcgatattgctcggcctcccagtgcgtcagctcgtattcgtcttcctcggacaaatatatgaccttgcttccatcaggaatgcggccaacgacctcggccaggcaacgcgccataacctcgccgccagcagtcagcgaactcgacagcaggacacccttgtcgggaacaatcaacattttgggaggcgctcgtcccgcgtcgtgcagcgcggcctggaagtccaccgcgctttggccttccgacagaacgccgatcttggttccgaggaagatgacgtggtcgggatacagcgaaccgcccaatgcgagcttccggttgacttcggacaaggcgacggcgtgacttgcggggtctcgcgcgggatggaagccggacccttcggcaatctcttcaagtgccgcgacatccgccttgatcgtctcgcgcgtctcgcgagacagcgctttcgtgacacgttcgatcctgtcggcgacctgttcgagagtgtcgccgcatacgatgatgccgtgattgaacaggatcagaacatccggtcgggccgcggcggccttttcgatctcgcccgccagtggtgttccagggcgccggtaggggatggtcacccatgtcagatccggaactgtgctcattcgagcggcgagctcgctgtcgcggctttcgagcacggcaagggcgatcgcgttgacacagtggtagtgagcgacaacgggactgttgagtgccgcatgaaagctcgtttcgatcgagggtctcagcccactcgagttcaactcgctgacgatgaaatccgtggatttttccgcgcgcgagtcgccttcgcgcaacgcggacacgagtggatcgacaaccaccggtaccatgatgtcttcggcctccgccttcgcgagccaggtgcccgacgccttcacccacatgacgccgtcctgcttgaaggaagtgttcccaccggcgccttgggttttcaggatgtcgtttccgatttcgctcgaaagccggaggaaacccttgaacacgtcggtttccctcaggtctggtttgcccatgaatgcctcctcccgcttattgacgcccatcgaatgagcgaactctggcgcaatcatatgaatgtgattgaatatcgtcaacaatgaagattttcgatctttatcggttgcggatcgcaatttcgtgtgattatagtttgtcatggacgttagggagaaacgtcagtggaggtcaatagttgaacgattccgatcgccatcgcctgattacggagatgcttcaagagaggcccttcgcatccgtgcgcgacctccaggagcggctcggtgtttctcccgccaccattcggcgtgacatcgacaagctcgatgagatcggcgtcgcccgcaaagtctacggcggcatttcggcgaacgaaacttccgcctcgggccgcctctcggcgcgtccatacgatgaaaaccgcgatatcgcggtcgatgccaagcgtgcgattgcggagaaagcggcaagccttgtgcgggacggagattcgatcatcgtccatgcgggttcgacatgttatcagcttgggctgcagctggcccggcgtaatgtccggctctataccaattccatgcctctcgccgcatatctcggcgaacacggcacctgtagtctgattttggctggcggcgttctctacagggagcccggcatcattcatgatgcgtcggctggcgcccctgatttcttcgcgtctcgctttttcctcggcacgcaagggatcagcgctgaggggctcctggagtcgcatccgctgctgacgaaggcgatcggtgagctgagcagctgcgcggacgagatcgtcttgctggcggatagccggaagctgtcgatccaacctcgcaacgtcgtcctgccgctttctcgtatcgggacgatcgtcaccgacgatggcttgtcggatgccggtgcgaaaatgctcgaggacgccggcatcacgatcatgatcgcaacggtcggggggcaatgatgacgtccccaaacgccgtcgctgtcttcgatctgggcaagacgaactcgaaactcttcgtgttcggtgctgacggatcgatcctcgcgcaaacccggaccaagccgcaatgggtcgagcacgacggaattcgtgtcctcgatgacgaagcgctgttcgagtggatgacggctacattgcggcaggccgtcgatgattacgcggtgggccacgtgatgttttccggacacgggtgcaccttcgcgcttgtcggcggcgatcacctgacgcatccgatcctcgattatgagcaggatccaccaaaggcgcttgcgccgcgcatcgacatgctggcgcctgtattcagcgagacatactcacccaagctgccgctcggcttcaattatggccggcatatcctgtggttggaaacgaccaggccggacagtctgtccaaggctgacgcgatcctcgcatatccgcaattctggtcatggaagttctccggccgcaaggtgtcggaagtctcctacatcggttgccattctcatctctgggcgccgctcaagcaggatttcagcagcctggtcgatggtcggggctggcgggccaaaatgccggagttcgcgcgtgcgggcgctgtgatcggaggctggagggtgtcggagggcaaaagcgccgaagtcaaagtccacaacggtgtccatgacagcaactcggcgctccactactaccgctcgctgggatttgacgacttcactctcgtatcgaccggcacctgggtggtcatcttcaattcggcttgcccgctggatgcgctcgacgagcatcgcgacatgctggctaacgttaccgtggatggaaagcctgctcctacgatccgcttcatgggcggcagggaatacgatctggcgggcggcggatgggccaaaccggtcagcctcgaggctctatcaagggtgatcgcaaagggtgtcttcgctctcccatccttcgcaccaggcggccccatgcagggggtcgagggtcgcttcgtcgggccacaggtcgagggcgaggagcgggccgccgccgcactcctctacgtcgtcatgatgacggacctgtctctcgatctgatcaggtccgagcattcgatcgtcatcgacggcggcctggtgaaaactggtttgtttgccgagcttctcgccgaactgcgtcctacgcaggaagtctattcaagcacgaccgcggaggggagtgcgttcggcgcggcggcgctggtctttgaaaccgtcgggcaatcccctttcgaaaaggaaacgaagcgggcaacgccattgccgctttttgggctccgcgcctatcgtcaggcctggaggtcgttggccgagatcgaagagccggatgtcgcgcggccacgcaaggagttccacgcatgacgaccgcaggaaccgtcgagcacgtcccccttctcgagatgcgcaacatcagcaagactttcggaagcacccgggcgctaaccaatgtatcgctcacggtttacccgggagaggtccacgcgctgatgggggaaaacggtgcgggcaaatcgacactgatgaaagtcctgtccggcgcctacatagccgacccgggaggtgctgttgtcgtggagggcaggccgatcgtggcgggggatccgatcaaggcgaaggcaaacggaatttccgtcatctatcaggaattgtcgctcgctcctaatctgaccgtcgcccagaacatgtttctcggagccgagccctcccgttatggcgttgtggataaggcggaagcgcgtagccgcgtcgagccgatcctcaagcaactcggcatttccttcggcccttcgcagattgtggccgccctctccctgggcgagcgccagatggtggagatcgcgcgtgctctgacaaccaacgcgaaaatcatcgtgatggacgaaccgaagacctcgctgacgtcaagggagacggaacggctgttcgaggtgatcgccgggctgaaggcgcgcgggatcgcgatcatctatatcagccaccgcatggaagagatttacgcgctggccgaccgggtgagcgttctgcgcgacagtgcctatgtcggcacgctcgagcgcgaagacctgtccgccgagaagctggtggcgatgatggtgggacgcgatctgtcgtcattttacaagaaggaacaccgcgcaccgcttcaggcggctaagacggtcctggccgtccgggatatgggagacggccgtcgcgttcacggctgctcattcgatgcaaaggccggcgaggtcctgggtatcgccggtctcgtcggctctggtcggacagaactcgcacgcctgatcttcggtgcggacggaaagacatcggggacagtggccctcgacggaaatgagctggcgatcggcgggccgcgcgacgccatggatgcgggcattgcttacctcaccgaggaccggaaggggctcgggctctttctcgatatgacgatcaacgagaacatcaatatcggcgttatcggcaaggacgcggcgcgcggcggcatattgaatttcgcggctgcaaaagagcgggcgagccgggctatcaaggcactctccattcgcaccctcagcgccagcatcaatgtcggagcattgtccggcggcaaccagcagaaggccttgatcgcgcgtcttctcgagaccaagcccagggtgatcatcttggacgagccaacgcgcggcgtcgatgttggtgccaagtcggaaatctatcggatcatcgacgaactcgcgcagagcgggatcgcgatcgtggtgatttcaagcgatcttcctgagatcatcggcatcgcagaccgtgtccttgtcatgcgcgaaggccgcattgcgggcgaggtccaggcgacgccggagcatccgataagccaggaggccgtcatggccttttccacgggatcggcatcgaaagtagcctgaagcctgaaaccatagacgacgggatgataccatgacctcgacatcgaccgaccagacaaacgtcagcaaggcaaaattcaggtcgacattgaccgcgcttgggatgctgccggtgcttgtcatcctggcgatcggctttcaccttctgagcggtcgcttcctgagcgtcaacaatctgtcgatcgtcacccagcaagcctcgatcaacaccgtgcttgccgcgggaatgaccttcgtcatcctgaccggcggcatcgacttgtcggtcggctcgatcctggcggcctcggcgatggttggcgtcatcgtttcgctctatcctgagatcggcatgctgggcattccggctgcaattggcgtcggcctcgcctgcggcgtggtcaacggggtcatcatttcgtttctcaagctgccgccgttcatagtgacgctcggctcgctgacggcgatgcgcggcatagcccgtcttctcggcaatgacacgacggtcttcaacgccgaccttccgttcgatttcatcggcaacggctccctcttcggcatcccgtggctcgcgatcatcgcgctcgccaccattgtcatctcctggttcatcctgaagcgaaccgtgctcgggacgtggatctacgcggtgggcggcaatgtcgaggcggcacgactgacgggcatcaaggtgccgctcgtcctgctctttgtctattcgatgtcggggcttctggccggcgtcggcggcgtgatgtcggcggcgcgcctttatgcggcaaacgggctgcaactggggcaggcttacgaactcgatgcgatcgcggcggtcatccttggcggtaccagcttcgtcggcggtgtcgggtcgatatggggaacgctgatcggggctctcattatcgccgtgctgtcaaacggtctcatcctcgtcggtgtctcggacatctggcagtacatcatcaaggggcttgtcatcatcgttgccgtggcgctcgaccgctacaggctgaaagggcttagccgcacatgacgtgcggctcaagaaaccgggtttaccgggtcacgggcgcggggagcgccaaaatggaggaaagtatgcgtctgttttctaaactgctcgtcggtaccgcactcgcggcggccattgcaatgcccgcttctgccaaggacctccagaagatcggtatttcggtcggtcttctcggaaaccccttcttcgtcgcgacgatcaagggcatcgaggaccgcgccaaggagatcaatccgaacgtccaggtgacctccgtttcagcggactacgacctcaacaagcaggtctcgcagatggatagcttcgtcgccgccggcgtcgacatcatcatgctcaacgctgtggacgcgaaggcaatcgccccggcggtaaagaaggcccaggccgccggcgtgatcgtagcggcgttcgacgtctccgcgccgggcgcggacgtcaccgtcatgacaaacaacatcaaggccggcgaggaagcgtgcaagtacatcgtcgatcagctcaagggcaagggcgacgtcgtcatcatcaacggcccggcatcgtcctcgatcatcgaccgcgttcagggttgcaagaacgtcctgagcaagagcccggacatcaagatcctgtccgacgaccagaacgcgcagggctcgcgtgacggtggtctcgctgtcatgcaaggcttgctgacccgcttcgacaagatcgatgcggtcttcgcgatcaacgatccgacggcgatcggtgcggagctggcggccaagcagctgaaccgcaacgagttcttcttcaccgccgttgacggcgcaccggatatcgaaaagtcgcttgccagcggcaactcgatgatcaaggcgtcggcatcccaggacccttacacgatggcgggcgactcgctgaagatggcggtcgatctcttcaatggcaagaagccagccgaagctacggttcttctcgatcctcagctgatcacggctgataacatcaaggactacaagggctggaccgcggctcgctaaagtctcctcccggtgctccgtcggaaccttcgggtttcggcggggctcattccgcaagaaatcaggaacttgatgtcatgtccaaaatcggcgtccactcgtttgtctggagtgcagggtcttcgaaagacgagatcgagaggacccttgcgcggtctcacgagctcggcttcaaactggttgagttctcctatctggatccggaacaggtcgatgttaaatggcttgcgtcccgcattcaggagcttggactggatgtcgctgtcagcatggggctgccggcggaaggcgatatctccagcgatgatccgtcggttgtcgccaacggtgaagcgatcctagaccgcgccgtggcactggttcgcgatctcggcggctcaaagctcgcgggcatcttgagttcggcccacggcaagcaggaacatgcgctgtcgcgaaaaggttgggaccaaagcgtcggcacgctttcgaaggtcgcggaccgtgcaaaggctgcgggtgtgacgctgaacctcgaaatcgtcaatcgtttcgagagcaacatgctcaacaccgcggctcaaggactggcctatattcgcgatacgggcgcttcgaacgtcttcctgcatctggacaccttccacatgaacatcgaggaggcggatgtcggcctcgcgatacgaaacgctgctgacaagatcggctatgtccacattggtgaaagccatcgcggctatctcggaaccggtaacatcgatttcgctgcgatcttcgacgctctcgtcgcgatcgggtggaacgacttcgtcacgttcgagtcgttttcgacgaccattgtcgataaggacctctcgctgaaaaccgctatctggcgaaatctctggcaagacaatgtcgcgctcgcaaaacatgcgcgtacatttatcgaacttggtctggaaacggcgcggctgaaggccgatctggtgaaggcggcccatatgccgacggcctgaagcgtaattcgagatttacgttcggcggtgtttcatgccgccggcaagcatgaatcgcgtcgggcttgccggaggccctttcgtttgagttatgcggcgatggctgagtatcggcctcagtcttcctcacccatcgatcaaacgcggctggcaagccgccgatcgtagccgctgaatgacacagcttcctcccgcgacgaatgctcggcttcatgattgcagcaccatacggatcgcacgcccagggacttgaggtgaaaacttgttccttggccaccgccgattcgaatcctcatgtcgctcacagcacattgctggtgccctctaacactgtcctcgcaaaaatcatcaagccattggaatccttaatctcttctttggaggctttgctcaccagatgacggctgtttccctgaaatggtgtccccaagcagaggagagcttgtcggggaagaaaattgaccgcatttggcaggggagaaaagagttggccacaggaacatcgggggtcctctagagaaggcttcaacaaccttaatcaggttgttggtacggctggcgagacgagtatcaaaattgtggtaaaagccccgcgtagcgaccttatcgtcacggcgtatcccgtgcactaggttaggagagggaatttgtcacataagaaatggtgcccacgatgtgaccaaggctgggttgtgcccgttagggtcatcaagaacgggatcattatccaattttgcttggagtgtgacgcgatctggccgagtgaattgacggaacttcaagcggagcggtatagcccagatttcgagcctgataccttttggagcctctctccgttcttggatagtcagggaatacatgaagaaatcggatcgatagaaaacgtctggccagacaatgagcatctctggcgcgcttgaaggaagtagtcttcgatgagttttctacttcgggctatggtgtaggctgggcgttctgttgccgtggctgcgcgatcgggcgaggtcttggcgtgcagatcgcagcgggctcggcggaatttccgcaggacgaaaatgtgcttttgtaagcggcgctcacaacccactgctagcgatcccaggtgagcgagcttgccgtcatcattgcggcgtcttgacgagtcgttaatttctatgaaatgctaagatgtcagaccaattcagaggtcggctgcctataagaatattggggaaccatgagggcatcaaacagcgataggccggtcatccggccgcttccggcgatggatcgcgcgcgtcaggtaacggatgcgctggcggactatgtggaagccgcgcggctgcaggccggcgagcggttgccggcggagcgcgagctgatggcgaacctcagggtcgggcgatcgaccattcgcgaggcgatccggcacttccaggcgctcggcgtgatcgagacacgcaagggcagcggaacctacctgctgaagccgatctccaaggcgaccattcatatgccgctgtcgctgcatgcgactgatctgcgcaatgcattgctgcaaacgctggaagtccgtcgcggcatcgagtgcgaggcgggcatggtggcggcgaagaagcggacggcgcaggacctgatcgtcatcgaagaaaagctcgacgagatggagcgggttcatctggagaagggcacgtcgggtcccgaggacctggccttccacctcgccatctatgacgccagccacaatccgctgtttcgccagttgctcgagcagatgcgcgagaccttctggcagttctggcagcaccccttcgaacggcaggatttcgcccgccgttcctttccctttcaccgcacgctgttcaacgcgatcgccgcgcgcgatcccgaggcggcgcgcgaagagacactgaaaatcctcgccgtcgtcgaggaagacatcaaggacatgtcccaatgagcaacggttcagacccgttcgagttcgcatccctcatcaccgcgcacgacgaaggaaatttcgccgaggccgtggtgccgccgatcttccagacgtcgctgttcaccttctccgattacgacgacatgattgcctcctatcgcggtgaaaaggtgcgcccgatctatacccgcggcctcaatccgacggtcaggatgttcgaggagatgctggcgaagctcgagggtgctgaggacgcgctcggttttgccagcggcatggcggcgatctcgtcggcggtgctcgccttcgtcgagccgggggaccgtatcgtcgcggtcaagcatgtctatcccgatgcattccgcctgttcggcacggttttgaagcggatgaaggtcgaggtgacctatgtcgatggccgcgatgaagaagccgttgccaaggcgctgcccggcgcccggctgttctacatggaaagcccgacgagctgggtgatggaggcgcacgatgtcggcgcgctcgccgcgctggcaaagcagcatggcgtcatctcgatgatcgacaacagctgggcaagcccggtcttccagcggccgatcacgctgggcgtcgatctcgtcattcactcggcctcgaaatatctcggcggccacagcgatgtcgtcgccggcgtcgtggcgggatcgaaggagatggtcgcccgtgtcaaggcggaatcctatccctatctcggcggcaagctgtcgccctttgacgcctggctcctgatccgtggcatgcgcaccttgccgatccgcatgaaggcgcacgaggcggcgggcatgacgatcgccaagcgcctgcaggatctcgatgtcgtcgagactgtctgccatccgggcctggccaaccggctgccggcgggtctcaacggcacgtccggcctgttctcgttcatattccgcgaaggtgtcgatatccgcgccttcgccgatcacctcaagctcttcaaactgggagtgagctggggtgggcatgaaagcctgatcgtaccaggcgaggtcgtccttcagcagaaggcacagcccaattccgcgcataccttcgggatccatgcgcggtccgtacgcctccatgtcggcctcgaaggaaccgaggccttgtggagagacatcgaggaggcgctttccgtcgcttcgtaaaagtccagaaaccgaggaaaaacctggaagggggaactgagcatgaaaagactgataaccgcaacgctgctggccacgttgatggcgggtacggccatggccgaaacgacgctgaagctcgtggaggtgatcaccagccccgagcgcacagaaacgctgaagtcgatcgtcgccaaattcgaggccgccaaccccggcaccaaggtcgacatcatctcgctgccctggaacgaagcgttccagaaattcgcgacgatggtatcggcgggcgacacccctgacgtcatggaaatgccggacacctggctctcgctctacgccaacaacggcatgctggagagcctcgagccctacctcgaaaaatgggaatacaccaagggcctgacgccgcgcgcgctcgagctcggccgcgacgtcaagaataccgcctatatgctgccctacggcttctatctgcgcgcgctcttctacaacaagaacctcttcaagcaggccggcgtttccgagccgccgaagacgatggacgaattcgtcgccgctgccgaaaaagtctccaagattcccggcaagtccggctactgcctgcgcggcggaccgggcggcctgaacggctgggtgatgttcggcgcgaccatggccggctccaacaagttcttcaacgacgacggcacttcgaccatgaacagcgaaggctggaccaagggtctcgaatgggtggtcgatctctacaagaagggcctggcgccgaaggacagcgtcaactggggcttcaacgagacggtggccggcttctattccggcacctgcgccatgcttgaccaggatccggacgccctgatcgcggtcgcccagcgcatgaagcccgaggatttcggcgtcaccaagatgccggttggaccgagcggcaagggcttcacgaccatcggtttcgccggctggtcgatgttcaccaccagccagaacaaggatctgtcctggaagctgatcgagacgcttgaatcgcccgaaggcaacatcgagtggaacaagcgcaccggcgcgctgccggttcatacttcggcggagaaggaccccttctacgccagcgagcagttcaagggctggttcgacgaactggccgacaagaacatcgttccaacagtgatgccgacctacctcgaggaattcgccttcttcaaggattcgctggctatcaagacgacgcagcaggcgcttctcggcgatatcacgccgaaggaactggctgaccagtgggcggactacctgaccaaggctcagcagaagtacctctcgaagaagtaagcgggctcagagcaggcagccccctcatccgaccctacgggccaccttctccccaaggggagaagggaacggaggcgtcgcggcaaatcccttctccccaacggggagaaggtgccggcaggtcaggtgcaacttgttgcaccggggatgagggggctacccccgatcggggtcctatagtcgaaccatgaaagccgccaaagatgaccatgaccgccgatacgctcgatagtcgccgtgaccgaaggtcgtggctgaagcgcgtcgccgatgcctcggaaccctatctctacagcgcgccatcgctcgtcctcatcatcgccgtgatgctggtgccgctggtgatcggcgtgtcctacgcgttccgcgacgtccaactgctgaaccccttttccggcggcttcgtcggcctcgatcagtttcgtgcgctttcgaaggacgccgccttttatggggcgctgaagaacacgctctggtggaccggcgcgtcggtcgtcctgcagttcatcttcgggctgatcctggcgctgctgctcgacagaccgttctggggcagggggctcgttcaggcgctggtgttcctgccctgggccgtcccatcgtttctcgccggcctcaactgggcctggctgttcaatcccgtcatcggaccaattccgcactggctttacgcgatcggcctgatgagcgagccgcgcaacatcctgtccgatccccaatacgccatgtggggaccgatcatcgcaaacgtctggtggggcattcccttcttcgccatcaccctgctcgccgccctgcaggcaattccgcgtgacctctacgaagcggcgtctatcgacggtgccacctggttccagcggttccgctcgatcacgctgccgtttctggcgcccaccatcgcgatcaccgttctcctgcgcaccgtgtgggtgtcgaacttcgccgacctcatcgtcgtcatgaccggcggtggtccggccgatcgcacgcagatcgttgccagctatatcttcacccaggccttcaagcggctcgatttcggatatgcctcggccattgcgcttgtgctgctggtgctgctgctcgcctattccatgctgatcatcctgctgcggcagaccctgctgaacaaggattgagccatgagacgatccatcatccccaccatcgcgcaccgtctggcgatcctgtgctacatcgctttcgcgctgtttccgctgttctggctgctcaaggtctccgtgacgcccaacgaccttctctattccgagggtgtccggatgtggccgtcgcgcacgacatgggaccactatagcttcgtgatccggaacagcgcgtttccgaccttcttcaagaacagcctgatcgtttcggcctcgaccgccgtcgtcgtcaccatctgtgcctcgctttcgggatatgcgctgtctcggttcaatttccgggcgaaatactggatcgtggcgctgatgctgctgacgcagatgttcccgctggtcatgctggtcgccccgatcttcaagatcctgacgccgttgcacctgaccaacagcctgaccggccttgtcgtcgtctacaccgccttcaacgtgcccttcgcgaccttcctgatgcagtccttcttcgacggtatcccgaaggatctggaggaggcggcgatgatcgacggcgcgacgcagttcaccgcgtttcgccagatcatcctgccgctgacattgccggggatcgcagcgacgctcggcttcgtcttcaccgccgcctggagcgagttgctcttcgcgctgatgctgatcaacggcaacgatgccgcgaccttcccggtcgggctgctgaccttcgtgggcaaattctcggttgatttcggacagatgatggcggcgggtgtcctcgcgctcatcccggccggtctcttcttccttctcatccagcgctacctcgtccagggcctgacggccggcgcggtcaagggttaatcacatggcatcgatcgacatccagaacgtcaagaaatcctttggccatgtgcacgtcctgcaggacgtccaactcaagatcgaggatggcgagttcgtcgtgctcgtcgggccgtcaggctgcggcaaatccacattgctccggatgatcgccggcctcgaggaggtgacctccggcgagatccggatcgccggaaaccgggtcaacgaactgcatccgaaagaccgagacatcgccatggtgttccagtcctatgcgctctatccgcatatgaatgtcgccggaaacatgagctacagcctgaagctcaggaagacggccaaggacaagatcgccagcgtcgtcggcgccgcggcctccaagcttgggctcgatccgcttctcgagcgccgcccgaaagctctatcgggggggcagcgtcagcgcgtcgccatgggccgcgccatcgtgcgccagccgaaggcgttcctgttcgacgaaccgctgtcgaacctcgatgcccgtctgcgcgagcagatgcgtgccgagatcaagaaactgcatggggacctgaaggcgacctcgatctacgtcacccacgaccagatcgaggcaatgacgctggcggaccggattgtcgccatgtatggcggggtggtacagcaggtgggcagtccgctcgaactctatgatcgccccgccaatctcttcgtcgccggcttcatcggctccccgggcatgaattttctcgacgcaacctacaggaacggcggcgcgcagctgaaggacggcaccgttgtctcgctgtccactccgctcaagcttgccgttggcgacaaggtgacgcttggaatccgtcccgagcatgtcgtcatgacatcggaggagaccggcatgaaggcaagtgtcgagctgatcgagccgaccggcttcgggatcatcctccatctctcgctgcatggtttgccgttcaagatattcacgcttgatcgggcggcactgacggcggggccggatgtcaatgtcagcttccccgcgcagcatcttcatgtgttcgacgcgaagggcgagagggcgagctgatcgcgatcagccttaagcctcgaagatcagaaggaagtaggccacgaacaaaacgaggtgcaccgccccctgcatcagatgcgtgcgaccgcttgaaaaggtgatgatgcttaaggcaagcgtgagcaccagcatgatcgggctgctgtgatcgaggccgagaatgacgggatttcccgtgagatggctgatcacgagcatggcggggacggtgaggccgatggtcgacagcaccgagcctagaaagatgttgaccgatcgctgcaggtggttggcgaccgatgcgcgcaccgcgcttatcgcctcgggcgtcgctaccagtatggccatgatcacgccgccgagtgctggcggcgcgcgcagcgtttcgatgaaatagtcgatcggcggcgccagctgctcgacaagaaacacgaccagcgacatgtagacgaggagcatcacgatcggccaccaaagcggtccctgatgagccgcgtgacggctttgaggcatcgcctcttccgtatcgtcgatgaaaaagccccggtggcgtccggtctgcagcatcaggaacaccccataaagcccgaccgagatgaaagccagcacagtctgctggacagtcgagtaacccggtccgccgctggggtgagtgaagttcggcatgatcatgctgagcgttgccagcggcacgatcacgcccagataggcattcgcgccttgcaggttatgcctctgctcatgtcgccgccaggcgccgagcagcagcgagagcccgaccatcccgttcaggatgatcatgacaacggcaaacagggtgtcgcgcaccagcgtcgggttgttctcgccgtgctgcatcacggcggtgatcgccaccacctcgatcgtggtgatcgagagcgtcagtatgagcgtcccatagggctcgcccaggcgctccgcgagatgatcggcatgccgcacgaccgccagcgcggagccgagaacgacggagaacagccatagaaaaatgagcgtgagcaagaaggggttggcaagcagcgccaacagcttcggaccctgaagcaggaaaatgacgctcgtcagcgcgctgatcgcaaggaaccactcccgctgcagcatgctgccggtgggcggacgatgcagcgttcccgcatctgctgtcacgtcgcgtttctcccgcggcaggtttccgtagccaggcagcacgtcccatgagaaaggcccggcgaccccatgtgatgaaagcacggggcttgctcggcctcaagatcaaatcaaccgagcgtttcgcgcaaggcgctgcgtttttgctcagaggttgcgtttgctgtgggcgatgaacgcccgaacagccggagaggcttccgttttcctgtaggcgacgacgaggtcggaggttacgttggtatgaggcagcgggacgtagcggatacccggtagccgaacgcattcgagcgatttcggcacgaccgcgacgcctgctccgatcgccaccatgctgccgatgccggtgaagtcccaggaggtggaatcgatattcggctcgaaccccgcctccttgcaggccgcgtaggtcgtgccgtggaagccgacatcgcgcggttgctgtggcgtcagaaacatttcaccagcgagagccgcgagattggcggtgctgcgttccagtgtgagcggatgcccatccggcaccatcagcatgatgggctcgcggcggatgatgtgggttgcaaggccgtcggggataggcgcggggccgcggatgaaggcgaaatcgagcagtccttcgacgatgcgggcgagctgcttgcgcagttccatctcggtcaggtcgatctcgacgccggggtggtcgcgcttgtaggccttgatcgactgcacgacggcgccggaataggctgccgacgccacgtatccgatggagacgcgtcccgtttcgccccggctgatcctgttgaccgccgccatcgcgacatccgcctgcgcgaggatcttcattgcctcgtcgtagagcacctggccggattgcgtgaggtgcacggatcgtcgtgtgcgatcgagaagcgacgttcccaagatctcctcgagtgccatgatctgctggctcaggcccggttgggcgatgccgagccgggcggcggcgcgctcgaagttacgttcctcgacaagggccacgaagtatttgaggtggcgcagttcgaaggttgggttgcgggaagaccgtcgtgaattcaggttcgtcatgcggggggctgctttagaataatcataaactatgagcgttgaaagttatcataactacgactgatgaaaataccccctgttatttattggatgaatcgggataaggtgactaaacaagtccagttttcggatcgtgactggattgggcggtagagtggcaagacaccttagtttcatggaagcgctggcggcaacggcggtggtaggcgtatcggtatcggctccgggccaattgcgggcgcaggataccgacgctgcgacggttctggcgccgatcaccgtgcagtccaaaggcgccgatgatcccaaggcgcccgtgaaaggcttcgtcgccaagaccagctcgacggcgaccaagacggggacgccgctcctggagacccagcaatccatctccgtcgtcaccaacgatcagatgcgcgcgcagggtgctgaaacggtcgggcaggcggtggaatacacgccgggcgtttccgggacgccctacggctccgatccgcgcttcgattcgccgagaatccggggcttcgacggccgccagtcgcaatatctgaatgggctgaagatgatgcgcaccgccggcgcgccggcgatcgatccctatcagctggagcgcatcgaggttctcaaggggccggcgtcggtgatgtatggccagggaaatccgggcggcatgatcaatctgatcagcaagcggccggtgttcgagcgcttcggagaggtcggcctgcaggcgggaagctatgatacctacggctcgttctttgacgtcggtggtcccgtcggcgacggttcggatttcgcctaccgcgtcactggcctggtgcgcgccgccggtgcccagaccgacaacctcgacaacgatcgctacttcatcgcccccgccctgacatggcagcccgatgacgatacgaagctgacgatcctgaccagcgtccagcgcgataaccccagcaccccatccagcctgccggcccagttgacgctcaacgcgaagggcaatcgtctttcccgcgacttcttcgtcggcgacgagagtttcgacagttcctctcgaacgctgacaaacctcggctatgagttcgaacagcgtctgaacgacgtctggaccttccggcagaatgttcgctactcgaatttcgactggagttatcaggcgctcggtatggccacgtcaggtctggcggccgatggtcggaccatcaatcgaaacgccaccttccaggacgaaaacctcaacacgttcaacatagacaacaatttcctggctgagttcgataccggtgaagtcgaccacaagctgctgatgggcgtcgactatcgatacttttccaacgatgccagcacgcaattctggagcgctacgccgcttgatgcgttcaatcccgtctatggtggtccgatcaggctcacgtccaagacgacggacgcgcatgtcgtctccgacctgcagcagcttggcatctatatccaggacgagatggcctacaacaactggcgcgcaacgcttggcctgagacaggattgggcgagcacaagcggcacttccttgaatggaaagaccaatgtcgagcggtcgctcgacaaggacgaccagaagctgaccggtcgcgccggcctcggttatgtcttcgacaacggcatcgcgccctatatcagctacgcgacgtcgttcgatccggttccggtgccgacgaccggccagcttctggaaccgaccaccggcaagcaggtggaaatcggcgtcaagtatcagcccgagggctggaacggtttcttctcggccgccgtcttcgatcttcgccagaagaacgtatccaacacggtcgctcttccgggcggcggaacgacgatcgcgcagatcggcgaagtgcgcgccaggggcgtcgagctcgaaggtgtggcaagtctcaccgacgggctggacctgcgcgccgcctacacgtacatggacacggaaattctggggcgcgcggacaatggcaagcggttggacaacgtcccggcaaacgccgcaagcctctggctcgattacaccttccaggagggaagcgagctggatggcttcggcatcggcggtggcgtcagatatgtgggacagcgttatggcgatacggccaatacattcgatcttgccggtgtcgctctcctcgatgccgcgatccgctacaagaaggacggcgttaccgcgtcgctcaacctcaagaacattacggacaagaactatgtctcaagctgctcctcgttcggctgctcctatggtgatggccgcaccgtcatggccaggttgagttttgcctggtaggcggcggataaagtgggcgcatgatttcagacaaatccaacagatcggctctgatcgggcggcggcaggctcttggcctgctcgctgcccttgccgttgcatgggatgcgaaggcggcagatgcgccaggccgcatcgccgcgatcgactgggcgatgctcgaaacgctgatggcgctcggcgtgaccccgatcgcggcgaccgagctcatccagtttcgcaatgatgccgtcgagccggagattccgtcttccgtcgtcgatctcggcttgcgcggctcgcccaatttcgagcttctctacctgctgaaacccgagctcatcctgatttcgccgttctacgtcaggcaccagccggcgcttgaggccatcgctcccgtctactcgctgcctttctacgtcaagggcgagccgccctatgccaaggcgctgaacgccgtctcgcaattgtgcgctctgctcggtcgcgcggatatggcggccaaggtgctggcagatcaggaggcgctgctggcgagccttcgccggcaactcgcaccgttttcggcgcggccgacctacatcgtcaacatcggcgattcccgccacttccgtgccttcggcgccgacagcatgttcggagacatcctgcaacgactcggtctgccgaatgcctggacggaccggtcgcgcttcaccttcgccgcaccggtgcccatggaaaacctcgccgccaatcccgaggcgcgtatcgtcatcgtctccgacattcccgtcgaggcgcgaagcggcctgcgcaacagcatgatctggaagtcgctccggccggtacgggaaggacgcgtcgtcaccatcggcaacgtcaacccttatggcggcatcaccgccggtcttcgcttcgcgcggctgttgagcgaagcgctcgccaacagcggagagacgctttgacgacacgcacagccttaatattcttcgccgccgcaaccgcgcttgcggtcctgctcttcctgcaacaggcgctgtcgttcctgccgttcgctgcctggccatcgctgccgctggcgccggatggcatgagcacagagcagattattctggcctacggcgtctttccaagagccgccgtcgccatcctggcgggtgccgccctcggcctcgctggcgccttgctgcagcggctgctgcggaacccgatcgccgatccctcgacattgggcgtttcggctggcgcccagctcgccattgtcgcgacgacgctgttttatcccgcggtgcttgacggctaccgcgcgctcgtcgcgctcgcgggcgccggcggcgcaacggcgctggttttcctgctcggctggcgccgcagcttcgatcccgtcaccatggtcgtctcaggcctgctcgtcggcatcacatgcggcgcgctgtcggccgcgatgacgctttcgcagggcgaatatctcatgtcgctggtgacatggaacggcggcgctctcggccagcaggactggtccgtcgcctcgacgctttcgctcgaactgctcgcgggccttgccgccagcatcctgctgctgcggccgctggcgctgttcggcctcggcgacagcggcgcgaaatcgctcggcgtcgggctcgtcggcatacgcgtggcggtcgcggtgatcgcggtgggtctggccgcgggtgtcgcggcgagcgtcgggctggtcagctttgtcggcctcgccgcgccagccctggtgcgcggtctcggcgtcaggaagccgcatgccatcatccttttgtcgccggttgcgggcggtctgttgctctggctctgcgatggccttgtgcaattcctcggctcctccaccagcgagacctttccaacgggagcgatgacggcgctgatcggcgggccgctgctgctctggctgctgccgaaggtgaagccggtggaactgcacgaggagcgtgcgcatgtggccggtgcgagggcgccgcgcagatggctgatcctgcttctcgctttcttgccggcgattgctttggtcgtgcttttcctggcgcggacccctgccgggttcacgctgctgtcgacacaggacttcgccgaccttctgcccatgcgctggccacggctgctggcgtcggccgccgcgggcagcctgctcgcgatcgccggcaccattctgcagcggttgaccggcaatccgatggcaagccccgaggtgctgggcgtcagcggcggcgccggtgtcggctttgcggcggcgatcaccatcgtgcctgccgccggtatcgccgaactgttcgccggcgccggtatcggctcgatgatcgtgatgatcatcgtcgtcgcattcgccagccgccggcagctctcgcccgaaaggctgttgctggcgggcatcgccgtcagttcgctgacatcggccatattgtcggcgctgcttgcgatcggtgaccagcgctcatggcagattctttcatggctcggcggctcgtcgaacacggcaacgtcggcctcgtcgacggttctggcggttctggcgctggtcagcacgggcatcgtgcttttcttcacgcgctggctgacgatcctgccgctcggcagcgctgtgccggttgcgcttggcgtgccggtgcgctcggctcgcaccacgatgatcttcgttgccgggcttgcgaccggcgcggcgtcgctactcgtcggacctttgagtttcgtggggctgatggggccgcacatcgcccaccgcgcgggcttcataaagccggcgcaccagcttctggcatcgtcggcgatcggcgctctgttgatgatcgtcgccgatctgggtgcgcgcacggcgacctttccctacgaactgccgctcggcctgttcgcggcgctcgccggcgcgccctatctcgtctggctcatcgcggtcaggcgctgagcgtcaagccagtgccgatggcatcgcgacgcccagccgctcggcatggccacgtagcgagtcgataattccgggaaacaggcgcacaccgttggccagcgcgccgcgcttgcgcgcgagcccgttctcgcccggaaggcggacacgctcgacgccggggcggggcggattgtcgtggcatgcatcgacgagccatcccgtctggcgcaggaaggcttcgcgaccgccgaacgcggccggatcgaatacctgtacggtgaccgcggcattggtccccttcggcgcatccgcgcggccatagcccgatagcgcctgggtgaaggcttcgacatgcagcgccatgccgtatcccttctggccgtggtcgagcccgccggtcggcaacagcgtcccgccgcgttcgatgacaccagggtcacggctcgggttgccgtccgcgtccatcagccattcgtgctcgtactggcgaccttcgcggatcaggcgctgcgccatgttgaccgtggtgatcgaggcgctgatatcgattaggatcggatctcccgatgtcgggatgccatgcgccacggggttgggcgtgtagacgcccttgcggccgccgaatggggcgacctgcgcgcccgaagggctcgaacttgcgatgctcaccatgtagccgcggtcggtcgcgatcggcagataggcggcgaggcaaccgatatggtggctgttggcgatggttatcgtcgccgtcccgtatgtctcggctctatcgcagccaagtttgacggcctgcgatgtcagccatgcgccgggcaggcgcttgccgccccaggcgacggcggggccgcggtccgatatgacatcggcgctgccctcgcgcatcatcacgccatcggcgatgctctgcagataccagccggcaagtgcaaggccatgggtcgtgtgccccatcagatccgcctcgacgagatagagggccaccgcctccgctttgtcttcctccaggccggcggacataaacaggtccttggcaaagccgcgcagtgcctcgggcgcatatcggatatcggcggtgtcgctcatgggtttctccgtcgttattgaaagtgcgagccgttcagcgcgcgagaaagcgcgcttcgagcggctttccatccagcgcatccaggacattgcgtgccgccatcaccgataccgcgcgcttggcatcgagcgtgacgcccgccacatgcggtgagacgagcgtgttggggagctggaacagcggattgtcggcgccgggcggctcctgttcgaagctgtcgagaccggcgccggcgagatggccttcctccagcgcgcgaataagcgcgccttcgtcgacgacctcgccgcgcgcggtgttgatcagaagtgcgcccgatttcataagcgcgatccggcgcgcatcgatgagcttgtcggtttccggcgtcagcggacagtgcaggctgacgatatccgatgaagcgagcagcttgtccaggtcggtctcgcggcgaacgcctccggcaaacgcgctttccggcgtatgcggatcgaaggcgataatctccatgccgatcgcgccggccatcttcgcgagcgtctggccgatgaagccgaaaccgacgatgccgagcgtctggccacgcagttcccggccttgatactggttcttgtcccagatgccgtcacggatcagcgcatcctgccgcggcaggtccttggcgagcgtcatgatcatcgccagcgcgtgttcggcaaccgagtgaccgttgctgcctgtcgtcatcgagaccggaatgccgagcgcggtggcggccgcgacatcgatatcattggtcccgacgccatgcttggcgatatgccggagctgtccgccagccttcatctcctcggggccgagcttgtcggccagcagccggatgatggcggcatccggcttgtgggtcttcatgatgtcgatcaccgcctgcctgtcgatatagggctcggtcgatacgaccgtgacgccggcttcgaccagcaaggagaacccttccggcgccagctggccgccgagaacgataacggttttgttcattgttcatctcctcccgcgagaatgaccggccatggcgcgtggtgacaccgaggcgtttcagatctcgttccggatcaggccgcctgacgtcgcggcgagcgggccatcagtctggcataggcgatcgccgagagcatgttgacgtgattggccttgcccgtgccggcgatatcgaaggccgtgccgtgatcgacggagacgcgatcgatcggcaggcctagcgacacgttgacggccgtgtcgaatgcgacgagcttgatcgggatatgtccctggtcgtggtattgcgcgatcaccaggtcgaaagcgccattataggcgcgggcgaagacggtatcggccgaaatcggcccgaccacgtcgatacccttggcctgtgccagttccacggcgggcgcgaggaattcggtgtcctcggtgccaaacaggccattctcgccgcaatgcgggttgaggccggcaacggcaatgcgagcattcttgcccagccgcaggaaatgctggtgaccggcttcgatcgtggccagcacgcgctcggtgcgtgcccgttcgatcgcccccttcagcgagatgtgcgtggagacgtgaatggtgttgaggcgctcggaggcaagaagcatgaacgagctcttcgatccggtcaggtgcgccagaagccccgtgtggccgtcgaagtgatggccggcaaggttcatcgcctccttgttgatcggcgctgtcacgatgacatcggcctcgcgcgacatcgcaagctcgacggcgcggctgatgtagcggaccgaggcgtcgcccgcgaccgggctgaccttgccgatttcgggcagggcggcgccgagatccacttcatcgacggcgatgctgtcctcacccgacgacccggcaagcgcgaaccgcaggcccgttccagctgaacgattggcacgctcaagcgcttcggtgtttccgacgatcacgaaatcgcggcgctcgatctcaggcaaggttgccagcgccttgacgatcacctcggggccgacgccggccggatcacccagagtcaccgcgacttttgcatttctgtccatcagtcacattcccttattggatcgaaggcactcagtaggcggcttcgtatatcgaacgtatgtcggcgcgcgcgagatcgcgcgggttgttgtcgagaagacggcgaatggcgaaggcatcgtcggccatggcgtcgagatcgctatccggcacgccgagcgccgagagcttcatctcgatgccgagatcggcgcagaaggaataggccgcgtcgaagaccgactgcacgtcgtccgatgtcttgcggccaagcgcgtccatcaccgcgcgggtcttttccggaaccgacggtgtgttgaacgccagcacatgcggaaagatcagcgcattggcggcgccatgggcgatatgccagcgcgtgccgagcggataggccagcgcgtgaccgccagcggtgttgaccggcccgagacagaaaccgccgtaaagcgaggcgagcgccaggccggcgcgggcctcggcgtcggcgccatccttgacggcgcgggcgagatacttgccgaccagtcgggttccctcgatcgcgtagaggtcgatcatcggatgcgccttgcgattggtgaaggcctcgacgcaatgcgccatggcgtcgacacccgtcgccgccgtcgtgcgcgccggaacggtgaaggtcagcgccgggtcgataacggcgatatcggcgagcatgtggatgctttccacggcaagcttggccatcgtctcgggatcggtgaccagcgcgcgaatgcccgcctcactgcccgttccagccgtcgtcggcacttgcgccagcgccacacggcgtgggccgtggaccttgttgggaccgacgacttcgcgcagcgtctgcgacgagccggcaagaaccgcggccagctttgcaagatccatggcactgccgccgccgaacccgacgaccagctgcgcatcggcggcattggcggccgcaagcaccttgtccagattggcggtgtccggctctggcgtcacatcggcgaagaccgtgatctcacccttcaggccgagtgtgtcgacgcgcgtggaattgaatgcgtcggaaataacgaggatccgggcatagcccttgtcgctcgcccatttacccaggcgctccgccgtccccacgccgaactcgatgatatcgggcctgatgattgtgataggcgaatccaagctgaccaccggattactcctcccctgcggtatcgcggcatctttcggtgccgccaagatgtaaatttgttataccagctctgtcgtgttggcaagcttggagagtatatttgttcggaaaaatacaatgcgctccagctgggtgccgtcgtgtttgccggaaatgtcaactatctgtttgataatgttgtattattgcgcagagcagaaaagtttccgcacgaagcgaccctttgcgtggtgcactggccagcggccgactaatttgtaaattccaatcaatgcggcgccagatcgacgcgccaagctggtccgctggcgcgtcgatttgacaagcggcgtgaggctcggcctcagcagagcgcgtccggagacagccgcacatacttgatcgcgcggcgatagtacgtgtaggcgatatgcaccgtgccatcggccccttgggttatcgacgggtaggaaaactcgcggttgacggcatccttcgagttgttgctcaagcagtagccatcgccggtatcgaggtcgatccggcgcggaaagctgtggccgccatccgtcgaaaaggcgaggctaagcggcgcgcgcggcacgccccagatcgccttgcgtctttggtgcggttcagctgcggcggacgcggtttcctcgtcgccttcgatctcgtcatagagcgacagacgccgggcgtcggacatcgaggcattacagtggttgtaaaccattgcaatatcgccatttttcagcttgactgcctggatggacgaattgttgttcggcaggtcgatcggctccggcgcgctccagctttcgccgtcacgcgagcggctggataacaccgattcggcgaagcggttgcgatagaaggcgacgaattcaccgttcggcaagggcacgatgttcatgtgaacagcgcccacgctgtcgggcacctcggtcatcgcccagcttttcccggcgtcgcgcgagatcagcacgcccgcggtatcggcgtcgcccgtccaacgctcgccggacagtccgacgcagcgaaagacgggtagaagccaggtgccggcgccgttcacgacaatgggctgcctcacgaacgtgccgggaagatcgcacagcacgcggacctcgccgaaggtaaggccaccgtctttggatatccgacatttgacaaccgagccgtcctggtttccagatgtctgagaggtgtaaagcagccagacatttccatcaggagcattgaaaatcaacggattttgctcggactttgcaggatcgtcggacattttctccggttgcgaccattgcgtggcgccgggcgccaggcgcgacatgtaaatcgagatgtcgcccatgccctccatcgtgccgccgaaccacacacaggtcagcgtcccgtccggcaggaaggcgagattggccgcatggttctggatgcagggggagaggaggtaggcgtcgaaacgtccgctttcgctgcgattggcggtaatttcgcccgtcataagggccggaacggcatccggctgcaaacccgtgaaggccatgtcgtcctccttacggcaatgtcttgtaggcttcggcaagcgatgcgtaatccgcgtcgctgatcggcatcagcggcgcgcgcgtacgcttccaggcggggttgccggtcttcaggccgaccatcgccttgatggtcgggatctggacgtaggaattggacagcgtgcggtaggcgttgatgcgcgcctgcgcggtttcgactgcgtcggcgctgctttcgtcgtgcaccttgtcatagacggtgcgcagcgaatccgcgacgaggttggaggttgccgtgatgcagccggcgccgccggccttcagcaatggcagcagcagcggatcggcgcccgcaagaaccgagaagcccgggtaggcggcgatgattgcctgcatgttgttgaaatcgcccgctgattccttgatgccggcgaccgtgtcggggaaggcttcgatcagccgtccgatcagcggcaccgacaacggaacgcctgaaacctgcggaatatgatagaggatgacctgcaatctgttgtcggcgatcttctccaggatctgggaataggcggcaaacaggccgtcgtcggagacacccttgtagtagaagggcggcagcatcacgacctttgtcacgccgagcgacagggcatgcttggtcagttccaccgtctcctggatggcgacgacgccggtgcctggcaacaacttgtccgtagggatgcccgccttcagtgccgcctcgaggatcgccttgcgctcgctcgaggaaaaggaattcgcctcgcccgtggtgcccagaagcgccacgccgtggcatccttccgaaagcaggcgctggcaatgctcggtaaacaggccgagatccgggcttccgtcggcattgaggggagtggcggctgcactatagacaccggtgatcttgtgattgttcatgtcgtcctcctcggatgaacgccgcaaatggcggcaaaaggcgggaagtccagccctgcaagatgcgggttttctcatcctcgttccgtatgttgtcaatatgacaaagcgcatttcaatcgatcgaattttttaagtatttgaaatttaataagaaaaatttttgtgcgttttgccgacgtgttgttgaattaatttctgttgacatatttacattatcgagcgagtgtcagcgccacgtcatgacgcactttcgggatggagcgaaagatggagacgtcatcgattttgtcatgggaggatggaatgactgatcggactaataacgaaaataaaggaatgtcgcgtcgcgaggcgttgaagctcagcctggccgcgggtgtcggcctgacgattttcggcctgaatgcgcgcatcgtgctcgcccaggacggccaggttctgaaggtggccaacccggcgttcaaccaggattggtcgccactgcgcggcggcggcgttccattccgctggaactcgatctggtgggcctcgccgatgtatttcgacagcgaaggcaagatcaagccttacgtcttcaccagctgggaatcatcggacaacaaggtctggaccttcaagatcgaccccaaggccgtcttctcggatggcagcaagatcaccgcggccgacgtcaagggctcctgggaagtcgcttccatgcccaacaccaagagccagcgcgccgaccaggtgctgagcaaggttcagggctacaaggaaatcggcgccggttccggcaacgagctgacgggcgttgccacgcctgacgagggcacggttgtcgtaacgctgacggaagccgacccgatcttcttcatgcgccttgcaaaccacatcgcgccgatcaccaaggccgcgcagtctcgcggcagcgacggcgaggaagtggtggattggtacaagcccgacagcagcgccgtctattccggcccgttcaagctcaccagcatcgatatcgacgccggcaagctggtgttcgagccgaacgagaacttcttcggcccgaagccgaagctggcgcgcatcgagatcacctcgatcgaggacaacgtcaccgcgacgtcactgatcaagtccggcgagttcaacgcacacaccgagctggtcacctcgacgatcatccaggacctcggccctgaattctccgccggcccgctgatcccgaccagccagcacttctggttcaacgtcacccgcgcgccgatggacgatccgaaggttcgccaggcgctgatcatggcaatcgaccgtgacggtctcttcaaggcttcctatcccgatggtccgcacaagaaggccgatcagatcctgaactcggtgcccggcgccgacaattccggcttcgagccctatccttacgatccggccgccgccaagaagctgctcgccgaatccagttacggcgggcctgagcgcctgccgaagatcctcttcgtcggtatctccgctccggccattcaggccgcggcgcagttcatcgccgaacagtggcgccagaacctcggcattaccgccgtcgacatgaagccgcagcaggactcctacgccggtccggaccagaactcggtgcagatcttccgcgacgacgtcggcacccgcgtgcctgacgccgtatcctacctcgccggctgcattgcctcgacctcgtccaacgcccagaacaagcttggcggctacaagaacgagaaggtggattccgctctcgccgaagccgcgaccaaggcggccgacgatcccgatcgcatcaagctcgcacaggatgcccaaaaggcattccgcgaagattgggctttcattccgtggtactctcaggcgatgtcgcgctgggccaccaaggaggtcaagggcatggagaagaacctcgactggcaggtcgtggcgccctgggacatttcgatcggctgagctgctcagaaacctacgaacagatagcccgcccgtaatcggattctgggcaaattagcaaccgcgcgaagaccgcaaggccttcgcgcaagtttcaagaagacatcgcatgtccgcatcgccgcggaaacgtgtctaccaaccggtgggaggtgaccttgttacgctacgtgctaacccggtttgccatctggattccgtcagtcctgatcgtaatgctggccgtctatgcgctggctttctatggtgctggcgatccgatcaagctgatctttctgcgtgcacccggcgatgtcgcctataatccgcagcgcatcgaagccatccgcgaaagtgccggcctgaacaggcccttcatcgagcagttcggcctttacatctggaacctcctgcatgggcagttcggcaattcgctgacctcgggccgctcggtctgggcgatggtctccgccgccgctcccgtttccttcaagctggcgctctgttccatcatcctcacgacggtcattgccattccgctcggcatgatcgccgcgatgaaccagaacagccgcctcgactatgctatcctcggatcggcgctcttcctctgggcgatcccggcctatgttgcgggcccgctgctgatggtcggtctcatcgttctcctgcctggtgtcagcgttccctatggctggggcggcgtcttcgacgtgcgcatcctgctgccgctgatcgtcctatccttccagccgatcgcgctgatcgtgcgccagacgcgcgcggccgtcatcgaggtgctgtcggaggatttcgtccgcaccgcccgcgccaagggtgtgcctgaaatggtggtagccttgcgccatatcctgcgcccggtgctgacacccgtcgtcacacagctcggccttatcatgatcaccatcgtcaacggcgcgatcttcgtcgagctcgtcttcggtctgcccggcctcggccgcctgaccgtgcaggcgctgaccaattccgactatcccgtcattttggcgatcacgctcatcggatccttcctggtgatgatgtcgaacctcctggtcgatgttctctatccgctactcgatccgcgtgccaacgatgcaagaaggagccgctgaccatgtccgctatccctctctctcccgtcgcccaacaggaagaggcgcccgtcaatctgtggcgcgacgcctggtatcgactgaagcgcaacaagctcgccgtcttcgggctgatcgtcgtggccatcctcgccttcaccgcgatcttcggcccctatctgacaccctatgactatctgagccaggatctgcaggcccgcaacgccaccccgtcgctgacgcatcttttcggcaccgacgatctcggccgcgacgtcttcagccgcgtcgtctttggcacccgcacggccttcctggtcgcggtcatcgtcaccgtcatcgcggtcttcatcggcacgctgctcggcgccatcgccggcttcttcggcaatccgttcgatcgcgtgatcatgtggctgaccgacatgaccatgtcggtaccgaatctgcttctcgtcgtcgtcatcaacgcctcgctgaaggcgccgatcgccaagtggatggaagcgcagtatctggcgaccctcaatcccttctatcgccagaccgtgtgggtcgacttcatgctggtcttcggctcgatggcgctgatctcctggccgccctatgcgcgtctcgtccgcgcccaggtcctgtcgatccgcggccgtccctatatcaccgccgcccaggcgctgggcctgtcgagctgggtcatcatgaagcgctacgtcattccgaatgcgcttggcccattgatcgtttcggtcagcgccggtctcggcacggccatggttctggaaagcgccttcagcttcctcggcgtcggcgtcaatccgcccacacccagctggggcaacatgatctccgacggcctgcgtgtctggcagcactatccgcacctgctggccgccccggccgccgtcctcggccttgcctcggtcgccttcagcttcctcggcgatggcctcaacgacgcactcaatccgcggggttccaaataatgaacacgacgcgatccaatgagaaactgctcgatgtccgcggcctgaccgtcgagatcgacggcagaaacggcccggcggtcgtggtcgatggcatcgacctgcacgtcaacaagggcgagacgctcggcgtcgtcggcgaatccggctgcggcaagagcctgaccatgctgagcctgatgcggcttctgccgaacaagatcaaggtcaccaagggctcggcgagcttcgatggtcacgacctgcagaagatgtcaaacagggaactgcgcaaggtgcgcggcggcgatatcggcttcgtcttccaggatccgatgacctcgctgaacccggtcatgcgcatcggcgatcagatctgcgagccgctgatctaccaccgcggcatgaagaaggccgaagcgcggacccgcgccgtcgaactgctgcgcctcgtcggcattcccggtcccgaagagcggctgcaggcctatccgcacgaactctccggcggcatgcgccagcgcgtgatgatcgcgatcggccttgcctgcaatccgaagcttctgatcgccgacgagccgacgacggcgctcgacgtcaccatccaggcgcagatcgttgacctggtgaaggacctgcgcgccaagctcggcatgtcggtcgtctggatcacccacgatctggcactgatcgccggtctcgtcgatcgcgtcgccgtgctctatgccggcacggtggtcgaggatgcccccgtcgacgaactctacgctcgcccgagccacccctacacgcgcggcctgctcgcttcgatcccgaagctgtcggatgcgccggcaagccgtctgagctcgatcggcggcacgccgccggaacccggtcgccgtcccaagggctgcccattcgctccgcgctgtccgttggcggaagccgtttgccacgagcgcgtgccgaaactcgagcccatttcaggcgccggaaaccaccgcaccgcctgcttcgtcgtccagaaaatgcaggaggccgcgtgatgggtgcccaaccgctgctcaaggtcgaaaacctcgtcaagcatttccacgtcaagctcggcgccttcggcgaacgctcggccaccgtctatgcgctcgacaacgtcaatctcgacatcatggaaggcgagacgctctcgctcgtcggcgaatccggctgcggcaagtcgacaacaggctttaccatcctcaacctctacaaggcgacatctggcaaggtcgtctacaaggggcaggacctggcgacgctggatgaaaagcagatgcggcctttccgtcgcgacctgcagatcgtcttccaggacccatattccacgctcaacccgcgcatgacgatcggcgaggcagtcggcgagccgatcctcttccacaagctctgcaccaaggccgagttgaagggccgcgtcgcggcactcctcaccgacgtcggcctgccgacccgtttcgcgcagcgttatcctcacgagctctccggtggtcagcgccagcgcgtcgtcattgcccgcgcgcttgcctgccagccgaagttcatcgtctgcgacgaggcgatctcggcgctcgacgtgtcgatccaggcgcagatcatcaacctgctgctcgacctgcaggaaaaatacggcctgacctatctgttcatcgctcacgatctcgcggtcgtgcgccatatcagcacccgcgtcggtgtcatgtatctcgggcgtttggcggagctcgcgacccgtgaggagctgttcgaaaacccgctgcacccctacaccaaggcgctgctttcggccgttccggaaaccgatccggagcttgaacgcacccgcacacgccagatcctccaaggcgacgtgccgagcccgctcaacccacccagcggctgccgcttccattcgcgctgcccgatcgccatggatgtgtgcagcaaggtcgtgccggagtggaaggaagccaagcccggccatctcgttgcctgccacgcggtgaacacgggacaggctgcatgacgctgaaggtcgcgatcatcgccgacgatctgaccggcgcgctcgacacgggaaccccgttcgtcgacgccggtctttccgttgtggtggcgatcgatgtcgaggcaatcgacgatgctctggcgaccggttgcgaggtgtcagttgttaacaccgcctcgcgcgccctcccggagggggaagcggcgagaagggtcggcctcgcggccagcgctcttcttgccgcacatcccgagatcgtcctgaagaagatcgattcccggctgaagggcaatgtcgcggccgaaagtgccgccattgccgccatcttcggccatcgcgaggtagcggtcgcccccgccattcccgaccaggagcgtttcacccgtgatggccatgtggtcggacgcggtgtggaggcgccgttgtcggttgccgcccttttcgacggcagtgacgatcgggttgtgatcgcagatgcaagcagcgatgcggatctcgaccggctcgtctcggcgcatgattggacgacgacgctagccgtcggagctcgcggactcggcagcgcttttgctcgtcatcttcgccgcggacgtggcgcggcgacggcgttcgacccgacgcgcaatacgctcttcgcattcggctcgcgcgacccgatcaccggcgcgcaaatggcccggctcgaggcgtcggggtttctgcgtgcctcgatcgcggcgccgatgggtgcgctcgaccagactgaagcgctggacctgccggcactgctatgctgcaccggcgacatatcggaggacgcggtcgccgttgccgatcgcttcgccaagggcgtgaaatcggcgatcgaacggacgcatcccgatatgctgatggttggcggtggcgacacggctctggcggtgtttagggcgctcggcgttcgcacgctggtgcccaagggggaaatagaggcggggataccctggttcgacgtgacagccgccgatggtcgccatttccgttgtgcggtaaagtcggggggctttgggaaacccgatagtttgctaagactgatttctcagaatcaggcggcctgaaacaatgcctgcggggagaatggacgtggatgaagcaaacggtgcgccggcaacgccggcgccgaagccggagcgcggcaagccgatgaagctggtggaccgtgtgttcgatcagttgcaggaacgcattcgtgccgggaattatccgccggactcgcggctcccgggcgagcacgagcttgcctccatgctcggggtttcccggccgatcgtccgcgacgcgctggccaagctgcgtgaccagggcatggtctacgcccgccagggcgccggcaccttcgtcagcgccaacagttcgccgacaacccatctttcctattcgccggtcaagacgatcgccgatatccagcgttgctatgaattccgcctgacgatcgagccggccgcggccttcttcgccgccaagcgccgcgatgaggccgcgatccagaagatcgcctcggcgcttgccgatctccgggaagccacgagccatcagctgcacaggaccgacgcggatttcaatttccaccgcgccgtgacggaagccgccaacaaccattattacactgcctcgatcgatgcgctcaaagcccatatcgcggtcggcatgcatctccacgggttgtccttgctggggccgagacccggcctcgagcaggtcttccaggagcacaacgccatctacaaggccatcgcggacggccgcgccgaggaggcgcgcgacctgatgcgctcgcatctcgaagggtctcgcgaccgattgttcgagggcagggcgctcgatctgtcgttctgatgcggtgctgatgtcgatggcgttcgatgatctggcgcaagcaggacttgccgcatcggcgtttcgcgctcatgtagaccggatcaggctgcatggagacccggcatgacattcccgttgttcgacctcacaggcaagcgcgcgctggtgaccggatcgtcgcaaggcattgggctgacgctggcgcgcggtctggccgagcacggcgcctcggtcgtgatcaacggccgcgacgcgaacaagcttgccgcggcggcgcggggtctgtcggattccgggcatgatgttcatgtctctgccttcgacgtcacggatcatgacgaggtgaagagcgcggtcgataggctcgagcgcgatatcgggccgatcgacatcctcgtcaacaatgcaggcatgcagtttcgcgcgccgctcgatgtgtttccatcggacaagtgggatcagctgctgcgcaccaatatttccagcgtgttttacgtcagccagtcggtcgcaacgcacatgatcgcgcgcggccgtggcaagatcatcaacatcgcatcggtgcagagtgaattggcccgcccgggcatcgcgccctatacggcaaccaagggcgcggtgaagaacctgacgcgcggaatgtcggccgattgggccaagcacggcctgcaggcaaacgccatcgcgcctggctatttcgatacgccgctcaatcaggccttggtcgatagcaaggaattcacggcatggctggaaaagcggacgcccgccggacgctggggcaatatcgacgagctgatcggcgccgccgtgtttctggcagcgccggcatcctccttcgtcaacggccacaccctttatgtcgatggcggcatcaccacctctctgtgagaggtgaagacgctttcgtcaggtcggcggcgcgcccagtgcgtgcaggatgccgcgaagctcggcgagccctcgcaagcgaccgatcgccggatagcccggcgtcgtggtcttggtgaggtcgtcgagcatccggtggccgtggtcggagcggaaaacgatcgtctcgtctgacttgcgattgcggtcctccgcgaccagttccttcagcacggcaaccatgtcgacatcgccttcgaggtgagcgctttcgtggaagctgcggccgtccccttcgcgtttggtcgcacgcagatgcgcgaagtggatgcgcgaggcaaaccggcgcgcgatggcgggcaggtcgttatcttcgcgtacgccgagactgccggtgcagtaacacatgccgtttgccggcgatgggacggcattgaacagcgctgcataatcctcggcggtggacgcgatgcgcggcaggccgaacagggaccggggcgggtcgtcgggatgaagcgtcagcttgacgccacgggcttccgccaccggcgccacagcttcgagaaactcgatcagatgctggcgcagtcgtgccgcattgatgccggcataagcggcgagcctgtcgcgaaattcaggaatggtgagcggctctgtcgtcgagcccggcaaggccgaggtgatgttacgggtgatgtcggcgatgtcgctctccgacatggcctcgaaggcgatgcgggcgcgcgccttgtcctcctgggagtaggccgcatcggcgccgtcgcgctgcagaatgaaaagatcgaaggcggcgaacttctcgtggtcgaaacgcatcgccgtcgcgccggtgtcgatctcgtggtctaggtcggttcgtgtccagtcgacgacgggcatgaaattgtagcagacgatcgggatgccgcaggccgcgaccgcctcaaggctggcgatccatgcttcgatctccaccgtggcctgcccccccttgcgcttcaccgcgtccggaatgggaatgctttcgacgaccgaccaggtgagcggcgagcgccctgacggcgtcgtctcgatcatcgcctgccgctcgcgcacttcggcttcggtccatgcacggccgatcggcacctggtgcagcgatgacacgatgttggtcgccccggtttgtctcacctcgtcgagagcgaccggcgcatccggtccgaaccatctccaaccctgccgcatctgtttcctccttcaatgccttttgttttgctgttgctgttcgtcagcagaaataatcgggatagcgcgtgcgcagctccgccacgtcggggatgacggcgctcagatgatgcgtcatcgccgcgcgcgcggcttccacgtcatgcgcggcgatcgcgtcacggatgaccgcgtgctcgcccacgacattctccatgcggcccagcaccggtagtgtcagccgccgagcacggtcgatctgtaccttgacggacttgagaatgccccagatgccgggatagccggcaatctgcgcgatcgcctcgtgaaaggcctcgtcctcttcgtgaaagcccgaggtgtcgcccaggatggagagtgctctctggcgcgtgatgatggcgtcgaggcgggacagatcgggcgccgaggctatttgcgcggcgcgctcgaccgtggtgccttccagcgccttgcgcaccacgaccgcctcggggatcgccgataccggcacgcgcgacacgacggtgcccgactgcggatagatatcaaccagcccaccttccgaaagccgaagcaaggcctcgcgcacgggcgtccggctgaccgcgaaatcctcggcgatccgcttttcctgcaacgccatgccgggcggcatcttcagggagacgatgtcgtcgtaaagccgttcgaaaatcgcgtccgccgtcgtaacgcgccgcagcttgggcggccgctcggcctgtgccgaaaggtcgggagtggcggtggctgcggctggatgcatgtagtgccctaacgttgacttgaacgtgaatactagtatatcaattgaacatggctgccaagatccaccgcggaggaacggtgtttttggcagggaattcaggaggttccaaaaaagcaggccagaaaatccgaccgcgaaaatggatcaggatacgcagttgcacggatttgttgtgctccgtgcggccacaagaggaggagagacagcatgaaatttacccgcagaacattcgtcggaaccgcggcaagcgctgccgttgccgccatgcttcccgtcaaggtctgggcgcaggccaagaagcccgcgagcccggtgaccatcacaatcgccgacgtcgccggcaatctggcgctgacgcagggcatgttcgaagcctatgcatccgaaaagtccgactgggtttcgaagttcgcattcaccaaagcgccggcccccgagcttcccggcaagatcaaggcgcagcaggcggccggcaaggtcgatatcgatctggtgctgacgggaaccgatgcgctttcggctggtctcgaccagggcctctggctcgacctctccgcgcataaggcggcccttcccgacttcgagaagattctgcagccgcaggcattcaagatgcaggccctcgccaaggatcagggcgtcgtcatcacctattatccctcgggtccgctgatcgaatacatgcccgacaaggtcgccaacccgccgaaatcggcgccagagctgctggagtgggcaaaggcgaacaagaaccgcttcatctatgcccgtccggcgaattccggcccaggccgcaccttcctgatggggctgccctatctgctcaaggacagcgatccccgcgatccagtcaatggttgggcgaagacctgggagtatctggcggcgcttggcgaacacatcgaatactatccgaccggcaccggccaggtgatgaaggagctcggtgaggggacgcgcgatatcgttgtgtccaccacggggtgggatatcaacccgcgcgcgctcggcatcgttccggccgaagcgaaggtgcagaagctggaaggcttccattgggtgacggatgcgcactacgccgttatccccaagggcgtctctgacgagaagatcgcggtgttgatcgacgtcttgaactacatcctgcagccgaagcagcaggcgatcgcctatgacgccggctatttctatcccggccccgccgtcaaggacgtgacgatcgagatggcaccacaggaaagccaggacacgatcaaggagttcggccggccggaatatgccgactggattgccaacaatccgctggaagtgccgctcgagccgaagcagctcgtcgaagccttccggatatgggacgaaaagatcggctccaagaagggttgatccagcctgtcgccggcgctggctgcgatagccggtgccggccaattccatcctgacacggagagtggtttgaactcggtagcgaatacggtggcctcttcgcgcggcaccgcgcgtcttgaactcgatgggctcagccgttccttcggcgcttacaacgcgctcgatggtatcgaccttgcgatcgagcccggcgaattcgtggcgctgctcggcccgtcgggctgcggcaagtccacggcgctcaactgcatcgccggccttctggggctgtcgggtggggaaatccgtctcggaggcaagcgcatcgaccagctggagcccgaacgccgagggttcgggatggtgtttcagagctacgcgctctttccgcatatgagcgtgcgcaagaatgtcggcttcggccttgccatgcagggcatcaagggaccggaggccgacaagcggatcaatgatgcattggcgctggtgcggctggaaagtcaggcggagaagctgcccgggcagctctccggcggccagcagcagcgcgtggcgatcgcgcgcgccatcgtcatccgcccgccgatcgtgctcatggacgagccgctgtccaatctcgacgccaagctgcgtctggagatgcgcgccgaaatacgcggtatccatgatcagatcggctcgacgacgatctacgtcacgcatgaccaggacgaggcgctgtcgctggccgaccgtatcgtcgtgatgagccaggggcatatcgagcagatcggctctcctcaggacctctatcagcgccccgtcaatgtcggcgttgccgacttcatggggtttcgaacccgcgtttccgggaaggtcgtctcggtttcaggcgaggaggccgagatcgatgtcgcgggcgcgcgcatcaccggcacgatgcgcacgccgctcaagaccggcgacgccgccatcctgtccgtgcgccccgaggatctggtcgccgcggacgagggcatcgccgccaccgtttcaagcatggaataccgcggccgcgccttcttcgggctggcacgttccgccgatgggtccgacctctatttcagggccgacgacgccttgccgcgcggaacggcgacgcggctgaagccggtcgcgggcagggcgctcctgttcggggatagcgcacgatgagcgcgccatcgcttcgaacgcggctggccgcccgtggcttcgacggcaccaccatgctgatcatccccggcctcggcttcatgatcgcactgttcgtctatccgtttctctacggcgtggtcgactcgctcaccccgaaggacggcgcgtggtacgccaactacgccaagttcttcagcgatccctttcaatacaacacgatcggcgcgacgctctggctggcgctgccggtcacgatcatcaatctcgccttcgccgtgccggtggcctttcgcgtccggctgatgcgccggcaacgcctgctgacgaccatcctcgtgctgcccattacgctcggcacggtcttcgtcgcggaggggttgctgacatttctcgggccgcgtggctggtttaaccaaacgctgttgatcatcggcatcatcgacaatccgatcaagctgaccaacaactactggggcgtcttcgcatcgctgcttatcaccggttttcccttcgccttcctgctgacgctgtcttacatcaccggcatcgatccggcgatcgaacaggcagccgccacgcttggagcgggcccccggcagcgcttcctgcgcgtgttcctgccgctgctggtgccggggcttgcggtgaccttctgcctggctttcgtccaggcgtttgccgtgttcccatcggccgtgctgctcggcgcgccggcgggcccgacccgcgtcatctcgattgccgcctatcaggccgcgttcgagcaatatgatcattctctgggctcggcgatcgcgctcatcatgggcggcgtcgaattggctgtagtgctggccgtcctcggcgcacgctcattcttctaccgcggccccgccggcggcacgaaaggctgaccatgatccgcgaccaaggcctgacctcgaggatctggcgtttcgccatatgggcgctggctacgctcttcgtcctcaatctcctggcggtcatcgccgccgtcgtcgtcaattccttcgggacacgatggctcggcacctggctgccggccggctggacaaccaagtggtacttcagcgcctggaaggaattccagctctccagcgtcgtcctcgtcaccttcgagatcgtcttcaccgtcgtcatcatctccggcattctcggcgtgatgaccgcctacgccctggcgcgccgcgacttcgccggcaagcgcgtggtcattctgctcttccttctgccgctgctcattccgccgctcacctacggcatcccgctggcgacggtgctctaccagctcggactgggcggaaccttctggggcgtcgtgctgatcaacgtggtgccgtcgcttcccttcgtggtgctggtgatgatccccttcatcgagcagatcgacccgcgcatagaggccgccgcccgtgtcttcggcgcaggcaccaccagcctgttcctgcgcatcctgctgccgctgctcttgccgggaatgctggcagcgctgcttttggtgctggttcgcacgatcgcgatgttcgagcttaccttcctcatcgccgggccgaccacgcagaccctcgtcgtgtcgctctactatgccgtctttgcttccggcgtgcgggctggccagtcgatcgatgccatggcggtcgtctatatggtgacgacgctgttctggctggtgatcgcgctgcagttcgtcaacccgacgcagatcgtcgcaagggcaaagcagcagcccgcgcactgagcggagtgtgtccggcgcgcgccgcggttccgatatttctgttaacagaaaacttattgggtagggcgggtgttcttgactatcggcaggtggctgccaagtattgtgggcgtgacggtcatttcttgaggaacttgatcatggcgcagtacaaagagaccaaccgctttcactgtgagagcagttcgggcgcgcattacgttgttatcgagcagatcctgacgtcgcgtttggcgctggatgtcggcgaaagcccacgtaccgattacgtgacagataccggcgagatcgccgagcggcttgatgacgataccttccttctgcttctgtcggcggaagtcctgcacgttgcctgaggcggccgtgagccggtcgcggctggaaatctccgccggatggctttaactggacagagctgctccgggcgattccgtgagcgatccggaacgccatggccgaccaagacacgcaatccgatatgcccaccacccgcatgcaaagctgggcgcgcaactcgaccatctaccgccttgggcgacagatgatgaccgaaaagcaactggcggacgcgatctcgcgcaaggcgcggcagaaattcgaggacatatccgaagctcaggtcaaggcgctcgccgatctcgcggtcaagttcggccatgaacagggcggattgaacgataccgtctatgccgagatcagcgtgcgctccggcgtgcgcagcggccggtcgaagcggatcatggcgcagaagctcgcgatcaagggcatcgaccgcgagacagccgtcatggcgctcgaggagagcgacgacctcgtggctgcgatcaacttcgcccgtaaacgcgccttcggccccttccggcgcgaggaagccgacgacaagcgatacaacaaggaaatgtccgccttcgcccgcaacggcttcggtttcgaattgggacgttctgttctccgcatgagccgcgatgaagccgagacggtgcttgacgagcgacggtcgtaggcgcaggcgacagcactcgaatttcggccatgcctcgtgtcacatgtgcaaggcatgcccaagcgccttcagcgccgcttcctgaaccgcttcgctgcgggttggatgggcgtggatcgttccggcgatatcctcgaggcgaacgcacatttcgatcgccagcgcgaatgccgccgacaattcggagacgccacgaccgaccgcgtgcaggccgagcacgagattggtgtcggcgcgcgccacaacacgcacgaagccatcctcggattgcatggtcatggcgcgtccattggccgagaacgggaactgtccgaccctgatctcatagccctgcgcgcgtgcttcctcgggcgacagtccggcgctgacgatttccggatcggtgaagcagacggcgggaatgcagcgcttgtcccagcttcgcggtcggcctgcgatgatctccgccaccatctcgccttgcgccatagcgcggtgcgcgagcatcggttcgtcggtgatgtcgccgatggcatagacgccgcgcatcgacgtgcgacactggtcgtcgatgcgcagatacggcccggcgcgatcgagatcgagttcttccaatcccgcgcctgttgttggcggccgacgcccgacggtcaccaaaacgcggtccgccggtagtttcatctcgcggccatcggcttgctcgacgatcaagctttcctcgacatcggacagcgcctttgccttggccatcagatggaggtcgatgccgcgttccttcagcgccttcgcaacagggcggacaaggtcagcatcgtagtgcggcaggatctggccggtggcctcgacgatggtgacggacgagccaagcttggcgaaggccgtgccgagttccaggccgatatagccggcgccgacaaccaccagtctctccggcacgctttgcagcgccagcgcttccgtggaggagatcacccttccaccaaatggaatgccaggcagttcgactggctcggagccggtcgcgatcacgatgctctccgcgcggatgagctgtgccccggtttccgtctcgacctcgactgtctttccgtcgcgaaaccgcgcccggccatggacctgcttcacccttgccttctgcagcagggcggcaacgccaccggtgagacgcccgacaatcccatccttccaggcgatggtcctggcgagatcgatcgtaacgccttcggctcgaatgccgatgggatctcgaccgctcgccatccggcgtgcggcgtcgaattcgtcggcggcatggatgatcgccttggagggaatgcagccgatattgaggcaggtgccgccgggcttttccatttcgacgatcacggtgtcgatgcccagctgaccggcgcgtatcgcgcagacgtaaccgccgggtccggcgccgatgaccagcagtttgcagatgatctctttcatcgccttcaaccttcaatgaaaatcagcgccggcgtttcaagcagcacgcggatgcgctggatgaaggtcgccgcgtcccagccatcgatgatgcgatgatcgaagctggaggagaggttcatcatcttgcgcggcacgaattgcgtcccatcccaggcggggcgcgtggcgatcttgttgacgccgatgatcgcgacctccgggtggttgatgacaggcgtcgagacgatcccgccaagcgcgcccagtgagctgatggtgatggtggagcctgtcagttcgtcgcgcgttgcggttccgctacgcgccgcctccgccaagcgcgccatctcgccggcgcagtcccagatcgtgcgtgcctcggtgtggcgcacgaccggcacgacgaggccggcgggcgtttgcgcggcgataccgacgtgaacggcgccgtatcgggtgaggatgccggcatcgtcgttgaaggtggcgttgagatccggctggtcggcgacggccttgacgatggcccgcatcaggaagggaaggatcgtcagcttcggatgctccggcttgcgatcccggttcatcgtcgcccgaagctcttccagcgccgtcatgtcgatttcctcaacataggttatgtgcgggatgcgcgaagtggagagcgacatcttctcggcgatccgccgccgcatgccggtcagtttgacgtcctcggtcgtcgtattcctcgcgaattgggctggtgcggcaagcgaagaagcaccgcgcgcgagatattgctcgacgtcctcgcgcaaaatgcgtccatccggacggttcggtgaaacttgtctgagatcgaccccgctttcgcgggcgaacaggcgcacggaaggcgacgccaacggcttgtcatgcggtacgatgcttgctggctgggaaagcggttgcttgttggcctgcgccggctgcggctgagcaggcgcttcgctttcactggcagcggcggacggggtctcggtcatcgatggcgccggcagagcgggcgtcggagcatcatctccacctctgtcggctgtctctatcctcaccagcggcgccttcacggctaccgtgtcgcccacttcggcgccgagccaggtcaccgtgccgctgaccggcgacgggatttcgaccgtcgccttgtcggtcatcacggccgcgatcaccatgtcctcgaggaccggatcgccggccttcacgtgccattcgaccagttccgcttcggccacaccttcgccgacatcgggcatcttgatcgtgaactcgcccatcctcacgcctccatgacttcgcgaagcgcccgtccgacacgcgcggggccggggaaatagtcccactcctgcgcatgcggataaggcgtgtcccagcccgcgacgcgcacgatcggcgcctccagatggtagaagcaatgctcctggatcagcgacacgatctcggccccgaagcccgaggtcagcgttgcctcatggaccacgacgcagcggccggtcttcgacacggattgcacgatcgtgtcgaggtcgagcggcagcaggctgcgcagatcgatcacctcggcgtcgacgccggtatcctcggccgccgcgagcgccacatgcaccatcgtgccataggcgatgaccgtgaccccgcttccggcgcggcggatttccgccttgccgatcgggatcgcatagtggtcttcgggcacctcgccgagttcgtgtttcgaccatggcgtgaccgggcgctcgtgatggccatcgaacgggccgttgtagagccgcttgggttcgagaaacatcaccggatcagggtcctcgatcgcggcgatgagtagccccttggcgtcataggggttggaggggaccaccaccttcaggccgcagacatgggtgaacagcgcttcagggctctggctatgcgtctgaccaccgaagatcccgccgcccgtcggcatcctgagcacgatcgggcatgtgaaatcgccgttggaacggtagcgaatgcgcgccgcctcctgggtgatctggtcgtaggccggatacatgtaatcggcgaactggatctcgacgcagggcttcagcccataagccgccatgccgatcgccgtgccgacgatgccggattcgctgatcggggtgtcgaagcagcgcgtcttgccgtatttcgcctgaagcccatgcgtgcagcggaacacgccgccgaaatagccgacatcctcgccgaacacgacgacgtcttcgtcccgggccatcgagatatccatggcgctgcgcaccgcctcgatcatggtcatgctcgccatatcaataccccgctttctgccgctgccggcgtatatgcggcggcatctcggcgtagacgccctcgaaaatgtcccgcaccgaaggcttgccgccggcatgcagcgttccgtgttcctcggcgcgtttttgcgcgtctatcacctcgtcgaggatctcggcctcggcctgcacgtgacgctcctcggaccacacacccttgaggatcagatgcttcttcagccgcagcacgggatcgccaagcggccatgcgtcggactcggtcttcggccggtaggcgctgggatcgtcggaggtcgagtgggcgccgacgcggtaggtgacatattcgatcagcgtcggccccagattgcgccgcgcccgctccgccgcccagcgggcgaccgcatagacggcgagatagtcgttgccatcgacgcgcagcgccgggatgccgaagccgagcccgcgagcggcgaacgtgccggaaccgccgcgcgcgatcccttgaaaggtggagatcgcccactgattgttgacgatgttcaagatcaccggcgctctgtaggtcgaggcgaagacaagcgcggagtgaaaatcggactcggcggttgagccgtcgccgatccaggcggccgcgatgcgtgtatcgttcttgatcgccgatgccatcgcccagccgacggcctggacatattgggtggcgaggttgcctgatatggtgaagaagccatgctccttggaggaatacatgatcggcagctgccgcccgcgcagcggatcgttctcgttggagaagatctggttcatcatctcgaccatcggatagtcgtcggcgatcaacaggccggcctgccgataggtcgggaaattcatatctcccttgttcagcgccttgcggaccgcgcaactgacagcctcttcgccaagatgctgcatgtagaaggatgtcttgccctggcgctgcgccatcagcatgcgcgcgtcgaaggcgcgcagcttcatcatgttgcgcagcccggtcagaagcgcctcgtccgagagcaatcccgcccaggggccgacggcttcgccctgctggttgagcacgcggatgatcgagtaagcgagatcgcggatgtcttcggatgcgacatccacctccgggcgtggcacggcgccggccttggcgatcttgacgttggagaaatcgggtagaccgccagggcgaacggcgggttcggggacgtacaggctcagtcgttgactgtctggcatttcctatcttcctcctccgctcgcatcgatcctctcctcaggatcgacacggcgttctccctatagattgcgggcgatcaccatgcgctgcacgtcactcgttccctcgtagatctggcaaatgcggacatcccggtagatgcgctcgacggggtaatcgctcatgtagccgtagccgccgtggatctggatcgcatcggaacagacgcgctcggccatttcagatgcgaagagcttggccatcgacgcctcggagagacaaggcagtcccgcctcgcgcaggcctgctgcatgaaacaccagttgccgcgccgcctctatctgtgtcgccatgtcggcgagacgaaaggcgacggcctgatgctcgatgatcggtttgccgaaagcggtccgttcgcgagcgtagtcgcgggccgcttcatacgccgcgcgcgccatgccgaccgcctgtgcccctatcccgatccgaccgccttcgagattggcgagcgcgatcctgtagccgtcgccttcctcgccgaggcgaaggtccgcgccaatgcgcatgtcgttgaaggcgatctggcaggtgtcggaggcgtgcaggcccaacttgtgctcgacgcgaatgacttcgtatcccggcgtatccgtcggcacgatgaaggcggtgatacccttcttgccggccgccgcatccgtcaccgcgaatacgatgatgacctgcccgttcttacccgaggtgatgaactgcttggcgccgtcaagcacgtagtgatcgccgtcacggcgcgcgcgggtccgcagattggaggcgtcggagcctgcctgcggctccgtcagcgcaaagccgccgatccattcgcctgcggcaagcctgggaaggaagcgctgcttctgctcttcgtttccgaatttgaggatgggaacgcagccaacggagctatggacgctcatgatcgtcgagcaggggccatcgccggcggcgatctcttcgagtgtcgcggcgtaggcgaccgttcccgtatcggagccgccatacgtttccggcaccagcatgccgagaaggccgagttcgcccatctccttcagttcgtcacgcggaaagctgtgggttcgatcccgcgcggccgcacccggcgccagtcgttcgcgtgcgaaatcgcgcgcaaggtcccggatttggctctgcgtgtcggacaagatcatcagcgcgcctccctgtctgcgctcacggacgctcgatcgcgatggctgtcgcctcgccgccaccgatacagagcgccgccatcccgcgcttcagcccgtatcgctcaagtgctgccagcagcgtgacgatgacacgggcgccggaggcgccgatcggatgcccgagcgcgcatgcgccgccatggatgttgaccttgtcgtgggggataacgagatcgcgcatcgcggccatcggcacgacggcgaaggcctcgttgatttcaaacagatcgacgctcgaaagcggccatcccgtgcgctcggagagctttctcaaggcaccgatcggcgcggtggcgaattcgctgggtgcctgcgagtgtgtagcgtgcccgacgatcgtcgcacgcgtttccacatcgttttggtcggcccgtgaccggcgcatcaacacgagtgcggctgctccgtcggaaatcgagctcgcattggcggccgtcaccgtgccgccctcgcggaaggccggtttcaggcgggggattttgtcgatgctggccttgcccggttgctcgtcctcgaggatcgtcgtttcgcttttgcctgatatgaccgacaccggcacgatctcgcgatcgaaataacccgcctcgatcgccttctttgcccgggtgagggaggcgatggcataggcgtcctgcgcctcgcgcgtgaattgataggcctcggcacagtcttccgcgaatgtccccatcaggcgccccttgtcataggcatcctcgagcccatcgaggaacatatgatcgaccacgcgcccatggccgagccgatagccgccacgggcacgatcaagtagatagggcgcattcgtcatgctttccatgccgcccgcgaccaccaccgaggcgctgccggcggccagcagatcatggccgatcatggcggccttcatgccggaaccgcacatcttgttgacggtgcttgcggcggtggagaagggaaggccggcgccaatcgcggcctgccgcgccggcgcctgcccctggccggcggcgagcacgcagcccatgatgacctcgtcgatgctctcggccggtacgttggcttgcgaaagcgccgccgcgatcgccgacgccccgagctgtggggcggtcgccgcgctgaacacgccctgaaagccgccgatcggcgtgcgggcagcgcctgtgatcacgatcggatcctgcatcgtcattgcgacctcctcctcgaagccggcatcgggctacaccgcaggccacaacacaattgcccctccgaaaacggaaagagcatgatgtcgtcgatcggcacggttctcctcccatgcggcatctcgccgattgcaccgcgccgcaacctcccacggcacgtcaggcaatcaagatgaagtaaagtctatgcgcgctcggcgttgaaagcgatggcaaattgttgcgatgttcttccgcgccgggcaacgatgttgccggacatgcgcctgccttggaccgatcgttgcgacgcggctccatcgctgacgctggaccgcgacggtgtttcgagtccagcgcctttggggtggttgcgtcggctatcggccgtatcgggcgagcgacagatcgctgacgtcgatatccgcttttcggccactgacgatatccgtcagcactcgcgctgaaccggtgctcatcgtccagccgagcgtgccgtggccggtgttgaggaaaagattgcggatattggtcgcaccgatgacaggcgtgccatccggcgtcatcggccgcagccccgaccagtagttggcagccttcagatcgccgccggggaacagatcactgacggaatgctcaagcgttttccggcgcgccgggccgagatcgttggtatagccggagatttccgccatgccgccgacgcggatacggtcgccgagacgcgtgatggcgatcttgtaggtctcgtccatgaccgtggactctggtgcgcgcgacgcgtccgtgatcgggatggtcagcgaatagcctttcaccggatagacgggaagcttgatcccgaacggcttcaggagcagtggagaatagctgccgagtgccaccacgacggcatcggatagaacggtgccggtatcggtcacgacacccttggcttgtccggcctcgaccacgagccccttgatctggcgcccataatcaaacgcaacgcccatcgatgcgcacttggcggccagcgcgttggtgaacttgaagcaatcgcccgtttcgtccttcggcgtcagcaggccgccgacgatcttgtcgctgacgtggcgcaacgccggctccatgcggatgcagccctcgcggtccagcacgtcatacggaatgccgtcggcggccagcgccttgacatccttggccgatgcgtcgagctgcgcctgcgtgcggaacagctgcagcgtgccctgcatgcgttcgtcataggcgatactggtctcggcgcgcagctcggcgagcgatacgcggctgtaatcggcaagccgcagcatgcgtgacttgttgatcgcatagcgctcggatgtgcagtttaagagcatcctgaccatccatgacaacatggcgtagtcgaccttcggtcggagaaccaggggcgcatgctccatgaacagccacttcagcgccttccgcgggatacccggcgcggcccacggagagcaatatccgaacgatacctcgccggcattggcgaaactcgtttcgagcgccgggccggactggcgatcgatgacggtgacctgatgcccggctttcgccagatagtaggcgctggtaacgccgatgacgccggcgccgagaatggtcactttcatgattgcccctgctatgaattatcgtgccatatcgacaggcgttggaagcgcccgcgatcgccctttgcgcgcccgcctccccgtggaagcgtcttcgcgaagataccgaaagaatcgaacaatttcccgccaatcatcgcgcaggcattgcgaccgatgggagtatgagacaataatgacgcgtcaagagaaggaatattgcgcatgcttctggacgcgatcgatcgcaacatcgtccggcatctcaggttgaatgcgcggatcgccaataccgcccttgccgccgaagtcggtctttcgccatcggcctgtcttcgccgcatcgcgcggcttgaaaaatcaggccacatcaggggctacaccgcgttgatcggcagggcggatgacgacgacgcgctggcggtgatcgtcaacatcacgctcgatcggcaaacggaagagcatctgaaccggttcgaagccgcgatccgcaagtaccctgaaattcaggagtgcttcctgatgaccggcggttcggactacatcctcaaggtcgaagtcgaaagcgcccgcgatttcgaacgaatacataaggatatcctgtcgaccttgcccggcgtggcgcggatacactcaagcttttcgattcgcgatgttctgaagagcggggtgaggcgcacataattgccgtcggcatcgcgtttcgacccgcgcggattcgcggtaaaacgccgtgcgcgcttgggtagatccttgcatggccaccgcatacatattaatgcctgtcgtcgttggctgcgttcgacatttgtccggcggcggaaacatttagcaatctttggcggttcgacggaatgcctgaggagacgattgtgcgtgaaccccagcaagccgggagcggtaccgatgcctttgccgcccagcgtttgacggcggaaaagatcgtctcctacgtcatcaacctcgaccggtccatcgagcgttggcagcatattcaaagccaggccgagggcttcggtctggacgtgcgccgcatttccggcgttgaaatcgacccggcgagccgcaagccctggccgcattatgaccatgcggcattcgtgcgcggcagcagtcgtccgatgttgccccaggagtatggttgttatctcgcccacgtcaaagcgctgaatgcctttctggcaagcgaggcggaatgcgctgtcatcatggaagacgatgtcagtctgagcgcggatcttgtgtctcgcgcctacagcgcccatgaggctgcgccattcgccgaggtcatcaagctgttgaaccaccgcacggtactctttcgcgcggtcgcgacatccgtcaacggtgatgagatcggcaaatgtctgttcggtccgcagggatcggcggcatgctacctcgttacccgcgacggcgcgcggaagcttgtcgatgcgctcaagatcatcacctgtccgtttgacgtggcgcttgagcgcggctgggccactggtgtgcgggtctacaccgtgaaagacaatctgatcgctttgtcggtgcgctcgaaagaaagtcagatcgccgatcgcgcacgctatcgatcgatcaagctgcgcggacttcgcaaaattccaacgcatgtctggcgcacggtggaactctttcgcagggtgcggtacgcagtttcatgagccacgcttcccaatctctttcctgccatggcattgcatgtcggctgctatcgctaaacccgccacgatcgagcctgccttatgtttgaaagctacgttcagcaagttcttgccttgccgcgaccggccaagcgggtcatcgcgttgctgttcgacgcctgcctgtgcatcatcaccgtgtggctggccttctgctttcgcttcaacgactggtacctgctgacgggtgctcaattctggacgattccggtatcgctggtcatcgccctgccgttgttcatcaccttcggcctttatcgcgcgattttccgattcatgggctgggcagccttttcgacggtcatcaagtgcgtgctgatctacggcgcggtctacatggtgatcttcaccgtcatcagcgttccgagcataccgcgaacggttggcattttgcagccgatgctgttgctgctcgccgttggcctgtcgcgcttcgtggcgcgctacttcctctatgatgcctatagcgaaattctgagcgaggccgcgccgatccgcaccctggtctatggcgcggggtcacaaggccggcagttggtcagcgcccttgggcactcggccgagttcaaggtcgtcggcttcctcgatgacgatcgtggcctgaagggcatgtcgctcaatggcgtgaagatctacagccctcttaacatagagaaggtttgcgccgatctcgaggtcaagaccgttctgctcgccctgccgcagatcgatcgcggccggcgcaacgaaattatcgaacgtttgcgctccgcaagggtcgccgtgcgcacggttcccgacatcagcgcgatcgcaaccggccaggcacagctgaccgaccttcaggatctcgacgtcgaggacctgttgggccgcaccgctgtcttgccgaacaaggggttgctggagcagaacgtgcgcgaccggatcgtgttggtcacgggcgctgccggctccatcggaagccagctgtgccgcgagatcgccaagctgagcccgaaggcgctcctgctgctcgaccagaacgaattcggcatctacgcgctgcagggcgaactcgctggcgaagacgcggagccgccgtttccgatcgtcccgctgctggcggatgtctacgacgaacatcgcatcggcacgatcctgcagacctggaaacccgcgaccgtctatcacgccgccgcctacaagcatgtgccgctggtcgagcagaacccggctgaaggcgtcaagacgaatgtcttcgggacgctgacggtatccagggctgcccttgcggcgggtgtcgagcgcatgatcctcgtcagcaccgacaaggccgttcgcccgaccaatgtcatgggcgccacgaagcggctggccgagatgatcctgcaggcgctcgccgaggagcgcaggaacacgaccttctccatggtccgcttcggcaacgttttagggtcgtcggggtccgtcgtgccgctctttcgccagcagatcgggcggggcggtccgatcacgctgacgcacgaggagataacgcgcttcttcatgacggtgccggaagcagcacagctggttatccaggcgggcgcgatggcgaccggcggcgatgtgtacctgctcgacatgggcgagccggtgaagatcatcgaccttgcgcgccgcatggtcgaactatctggtctcacggtgcaggacgagcagaacccgggcggcgacatcagcatcgtgacaaccggtctgcggccgggagaaaagctctacgaagagctgctgatcaacgacaatcctgaaatgaccgaccacccgaaaatccgccgcgcccgcgaacaattccttggctggccgcaactgtcggccaagctcgatgaactcgcagagcttgcacgcgatggcgacgcaaggcgcctgaaggcggcgttgagcgatcttgtgccgggatacagcccgatggaaggtgtcgtggatcttgtcgctctccggcaggaagtatcgcaatgaccatgtccgcttcgcgaaacaacgctttctcatggagtccgccatgttgctggtaaccggggcgtcaggcttcgtggggcggggcctcatgagaacgctgcgccagcatggcatgccgtttcggtcggcgagcagacagggtggagacgagctcttcgcggtcggcgagatagacggtcgcacggattggtcggccgcgctcgccggcatcgacaccatcgttcatctggcggcggtcaaccagaatgtcgtcgagggatcgccggctgttctggcgcaataccggtcggtgaacgtcgagggaacgatcaatctggcacgtcaggccgcgatggccggcgtcaggcggctggtgttcatcagctccatcaaggtgaacggcgaagcgacggcgaggggcaagcccttcaccgccgcggacgcgcccgccccggaaaccgactacggccggacgaagctggaagccgagcaggggctgcgggcgctggccgacagcaccaaaatggagattgtcatcatcaggtctccgctggtctacggccccggcatgcgcggaagcttccaggccctggttcggctcgctcagcgcggcctgcccttgcccttcgcctcgatcgataaccgccgatcgatggtttatctcgaaaacctgaccgatctcatcgtcaccgccgcaagacatccggacgccgccggcgggacgttcatggttgccgaccggacgagcccatcgacgccggcactggtacgcctgattgcttcagcggtcggatcatcgacattgctgctgccgtttccgcccgcgcttctggaacttgcgggtcgcgtcaccggaaagcgggaactggtcaatcgtctgacgcggtcgctcgaggtggacatctccgacaccagccggcgcctcggctggacgcccccattcgacatgagcgacggtctgtcgcgcacgctcggcacgacacaacccgcgaaggactgacatgacatcgacactgaaccgggggatgaagaggacctttgatttttgcgccgccttgggcgggctggtcgtcctgtcgcccgtgctgctcgtgctcaccatcatggttcggcgctcttcgcccggcggcgcattctttcggcagctgcgagtggggcgaaacgaagtgccgttcacctgcctgaagttccggacgatggccgcgggcacgccgaatgtcggctcgcatgacgccgcggaagcctggatcacgccgatcggcaagacgctgcgcgcctacaagctcgacgagcttccgcagctggtcaatgtgctgaagggcgagatgagcctggtcggaccccgcccgtgcctgccgacacagccggatgtgatcgccgcccgcagggccaagggtgtgttcgctgttcgccccgggataaccggcctggcgcagatcgcgggcatcgacatgtcgacgcctgaaaagcttgcgaccgccgatgccgaatacgtcaagacagccagcctctggaacgacatcgcgatgatccttggatccgtcatgggcaagggaaaaggcgacgccgcgctgaagtagacccgttgtttcttcgcggctttatgccgccgccggcaagggcgatgcttcccttgcggccggccgtaaacggagattgcaccagcaagcgaatgccgatgtcacgagagcaaggctctcgccgatcgccagcctgttgttggaattgctgagcagcgtcagcgcgaagaagaaaatgcaaacgagataggtatgcatcgcggcgcggggaatgaggccccgacgatacgccttgacgacggatacgacgaagctcgccaggataagggccatgacgaaggcgccgaagaggccgaatcggaccagtatttccagatagccattgtgaagcagcgtataggccacggtggcgtagcgtgtctgctgccagcgctccagccattggttgccccagccgaagaccggcgccgatgaaaacagctcccagccgttggaccatagctgcagtcgttcgtccatcgcggtcggtgtctctcccgactgaatggcctgcgtgatcgcgtcggcgccgttcgagctgccccatatgccgccgatcatcgaagccgttgctcttacagtcggaccggctgtctggtcgaggttctgacgcacggcatatatgccgccgacgagcaggatcgcggcgcacgcgatcatcaatccgctgcgggcgcgtatcctgatgtagcgcatgccgagcacggcgatgacgggcagcgtgaacgccatcgccagccacacgcccttggacttcgcgccatagatggcgatgagacagagaacaaggataatcggcgcgatcatctgcgcgaggcgtgcaaaacggggatcggcgtttggtgtggtcacgtagtgcaggagccagaacgtcgtcgtcacgaagatcaggccgcaggcgaccgcgccatggatctggttgttcatgatcagcgggctgaccgcgacgccggtggtgatcgtgccgatggttcgggatacggtgacggcgagcatgatcagagccacgatgaaaaaggcggcaatgatcttctccatctggttttcgtaaagcgcgaacgctatgcccaaaatcgggaagaacaacgggaacgcaaagagccagtcggatgctccgaggtcgtgattttccgtcgttatgtagatgtaggcgaagcgcgccagaacatacgccgcccaccccatgcagagccagccgagccagtttgtgcgtgggcgcgaaggctccttcacatagtagacgagcgcgatgatggccaatatgcccgaggcgtagcggtatgtgtcgctttccacgagaagcgccgacgccgctagcagccaaagaaaacagccgaacattcgaagggcaaggctcatggctgcgctggacgcgcggaacgaattatccaacacttttacttctgctcgcgcgcgtttccatgcgtctttatcgacggccgctctcttcgtcgacatgacccgtcccgcgtcttctcggagcacggtacggttgtttgatgaaatccatatttacgaaaatagtaaggccgacaagccgtcatcggcgtcgtccagatcaaaagtcgggccgtggacgcaaaaaaagcgtgggagtgacatgatcgtcgcgccctgcgaaatccaccaccgcatgaccttgccgcgtcggctagtgggtggcgcggttctgcttggaaagcgtaaggatatagtcgtccgcgatatcggcgatcgccatcgcgatctcggccggggagaaatccatttgcttttccccgaagatcaactgatgaaccgcttcctcgatctgctgacggcaagccagcaatcggtcggcgtgactaatttcaatggcaggtatctgcatggcatctgtccccaatgtgctgcgcctgaaacgaagttccgtgtccagattgctccggcgctgacggtcgccgacgcgaccatggccacacgcatgccccgatcttcgcatgccagtatagagagtaagtccaacgatttgcgtgaaatcgctgtgacaccatttaaagtggttcttttgaattcgctaacctaaaacggtaaaagagcctcggcgttgctatgtggcggccgcggcctcttttctgcaacgttcgagatggagcgaaaagaattttcgccgcttctttacttttagttgcattttcctgcgacggcttcattatatgccggtattcctaatattgcaggcgagggacgccatgaaggcgaaatcgacgaacgcgatcgacggctatgtcggggagcgagtaaggctgcgccgcaagatgctcggcatgagccaggccagcctcgcggaggcccttggcataacttttcagcagattcagaaatatgaaaaaggcatcaaccgcatcggcgccagccggcttttgcggatggccgagatattcggtgtagcggtcggctatttcttcgaggacggcctcgtaacggcgggcgacgacaacatgcgtccggaaacggacgctgtcgctgccttcatggcgtcgaaggaaggcctggcgctcggtaaagccttcattgcgatagaagacccgaatgtgcgccagaagctgctggcgttgacgcgcagcctcggctcctccggtatcgtcattgccgaccgtgacggcgccgaccagacataaagcgatttggacgagagcaatgatgcgttttgatcgatcgccgacagagccttcgcgtcgcgcgcgaccaatgggtgaacggttctgacggatttctctcagcatcaaagctattcggatcggatcattcccgcatccgaaacgctcacgcgcgtaaccccgttgctcgggcgtttcggcattacccgcgtcgcccgccataccggccttgaccacgtcggaatacccgtctggtgcgcctatgcgccaaacgcgcggtccgccgtgatcgcccagggcaaagggctgtcggacgaggatgcgaaggtttcggcggtcatggaggctctggaaagagctgttgccagccgcccggcggtatcgtcctttcagaccacggcgagagaccttcaggagcaagggcatcggttcacgactctgaaagagctgatcggtctgcgcaaggccgatatcggcttggacgatacggtggagtgggcgacggcccgggagcttatatccgacacgcccattcatcttccgcttgaggccgctgttctcgaccggcggcatgagggtcggttctgggcgtcatcggacgggcttgcttcgggaaacagccttgatgaagcgatcctccatggcatgctggagcgcatcgaacgtgatgccttcgttctgtggcagatcggcagcgacagccatcggcacgcgacatgtgtcgacccgaccgcgttcggcgatgaggtcctgaacggactggttcaaaggatcaatgcctctggccttgtgctgaagctgttcgacatcggcagtgacatcgccgttccgtgtttcaccgccctgttgggaccaaggacggttctatcgggtgcagaggtgcgctttaccgaagtcacgggcggaagcggggcgcatccgtcgccggtaagggcgatcatccgggccgtgacggaagccgcgcaatcgcgattgacctttgtcagcggcgcgcgggacgacatctcgcccaaaatgttccaggcgacactgcccgaccagctgcgccagaatttgctcgccttgccggtcaaagcgccggcaatcgtcgctcgcaccgagcgatcactccagcaatgtctggctttcacgctggatgcgctatgcagggcgggcatcactacggtcgcggcgttaccgcttggagatcccgatcttccgttcagcgtcgttaaggtcttcataccgcagctggaaaaccccgaaggcaagagggcgcgtcggttcggtagccgtgctctatcgaaagcgttcgtttcgtgacggtcctgctttcgcaggctcgaaaacgtcatgcgtttcagcaccttaaagttgtttcacgctttattcacgggcgcgaaccggcgggctgtcttatgttgcagccagttggcggagaagacatatgagtgctatgcccaaaggcgacggggacgatcgacgcggtaatgcaagatcggatgaagagatgaaggaactcgcggctctcgcgcgtctgatcagctatgcgcggtgcgcggcggaagatgtggagctggtcggcgccatgcattggcttgaacttgccgtgcaggccgtgaatcgcgagatactggaatcgccgaacgtcgagatgatcacgccatatctcggtaccacgaccgaccgtcgcaacacccactgaccaacggatagattcgagcgtctaggcgacctgcgaagccgccttttcctcgatgatctttgcatagacgcaaaggtttttcgactgatcgtagccattggcgcgataataatccgcaacgccgccggcttggcgggacaccagccatatctgcttgtagcgcaagcggatcgcttcgcgctcgatgtgaaagaggagcgtggtccctattcccattctctgatgcgatggcaggacggcgatctcggcgacatacaagcccgtgccgatggccgaggtatagggcgacgcgaacacgtagccgacgatccggtctccgtcgaaagcggccaaggatatggtatcggccgaagagcacagttcggtcagccgtcgtctggcgttgtcgaggtcccagcgttcctcccagggaggagcggcgtatgccttgacgataatgtccgcgctggccagcgcctctgcctgatcaattcgctttacgctgaacgtcatacgaacctgctaccgaccggtgccccgtttgtttcaaccgacgcaataaaacatacctatgcctgcagatgttgtgacttcgatgtgacacaccttatgggtgaattcgaggcataatacgtacatcccgaatgcaagtgggtcgagcgcgagcatatgatcgcttcgaacggatcgtggcgggaagcatcgcccatcgaccgcctatcgcgcgtcgagacctcgtgcagatgttgactttcacattcagcattccagatgacttatcttgaactgttgcgcgctgacgtttggaggaaatgaatggcggaactagcagtttttatcggatgggattcccgcgaagatattgcctaccaagttgcgaaggccaccttgctcgataaggcctccatcgacgtcgaggtgcacccaatcaaattgcaggaactggtcgatcggggtgtttatacccgtgaagtcgatccccttgcttccacggaattcacctactcccgtttctttacgccgtggcttgccgattataaggggtgggcgctgttctgtgactgcgatttcctgttcttcggcgatgtcgcggaactgctgcgctacaaggacgacagcaaggccgtggcctgcgtccatcacgactacacgcccaaggagggggtgaagatggatggcaaggtgcagaccaattatccccgcaagaactggtcctcgttcatgctgttcaattgcgaacatccctccacccgccagctgacgcccgagctcgtcaattctcagaccggtgcctatcttcaccgcctgcagtgggccagggacagcgaaatcggtgaaattccggaagaatggaactggctcgagggctggagcaccaagccgtcccagggctttccgaagggggttcactacaccaacggcggcccatggttccataactggcaggacgtcgaatacgcggacgtctggcttgagaaggcacgggcgctcgacccgcagttcgcccccgtgtgacccgtgaacctcggctttctggtccgcctccgcgcggccttgtcgggcggagcgctgcggatcggcaggagcccgaacatgcggtatctgccaaggcttcgttatcgggacggtacgatagaaatcggcgaccggcttttcacccgatgcggcgtcgtccttgatgcgcagagcggtatgatcgagatcggcaacgatgtttcggtaaacgattactcaatcctgttaggacatggcggtgtcaggattggagataatacccggatcgcggcacacgtcgtcatcgtctccttcgagcacagctatgaagaccccacgattctcatcagggatcagccgatcaaaaagggcagggtggtgatcggcaaggacgtctggatcggtgcgggcgcaaaggtgcttgccggcagcaacatcgccgatggctgcgtcatcggtgcgaatagcgtgatcaaggggacgacggaaccgtttggcgtctatgtcggctcgccagcgcggctcatcaaaaggcgcgccttgcccgacatgacagggagagatcaatgatcggcagagatgagggcgtcggcttcgagaccagaaactccgccgccgccgaggagtggaaatccctgctagcgggatatagcgatgttgtgctggtcgccaacagcgatgaagtggacatcgaggagctgaaagcgcgttttccggagaccacgcttttcatcttcttcaacaaggtcttcaaggttctaagggagccgttcacccgccaggctatcctgctgtcgagaagcggaacgctgggcgcgaacctcgtcaagagcggcaaggtcgacaaggtgctgccctatttcgacatgcgcaccttccacggcgtcgtcaacatgaaggcggggccgaacgaacagctcagcccggcatcggacttcggcgacgttcatgtcaggcacctcgatctgaccgaggtgttcactccgttctacccgcgcgccagcgtgccgacgacgggatttgcgctgtgcttctggctgacgacgctcgatcttggcgtcaggatcacactggctggcttctcgtcgaagcggagcgagcgctacaaggtgttcgatgttcacgactggacattcgaacaggtgtttctgcgtctgatgttccgcaaagggaagatcgatatcatcgggcgcgaggcatccaacgcctatgctgacctttccgcgtactttcccgaatacacgcccgcggatattgcgctcaccgccaacgagatcatcggagaacgcctctccaacctgagctcgatcgtcgaccgcctgatggacgtgacccgttttctccgcttcctggatcggacctggaagagcataaagccaaagtctcgcaagcagcggcgatgggatgcgatggagaaaaagggaggctgatcgatcggcgatcggagcctgcccgcaaagcctgcccgctgaccattaatcgatgtttttttccagttgttcagccgcgatatcgggcggcgtccagccacgctcggccttctcgccgagcgcgcttcggtctcccatcatcgcctgctccagcaggtcggcgatttccttggccttggcgacatattcctcattgtcgtacacctcgacgtcctcccgccacaggggcgcaagtttgcgaaggcctcggacgtcctgccggacaaacaccgccttgctcttctcgacgtcgtagggatgcatgccgagcccctgcagcgcgtagccggcggcgcgcacggagctgtcgaagacctcgcgaacgatgtcgtgcgcgccggcctcgtagagccggtagacggtggtgcggtcgaaggcgcgggcgatgatgcggatgttcgggttctcgcgacgtgcatgcttgacgatctcgatcgcccgttccggatcgtcgatcgccaccaccaggaccttggcctcgtgaagtccggccgaatgcaacaggtcagggcggctggcgtcgccgaagaaagagcggacgccgaacttgcgcaggccatcgatgacctcggcctggtggtccagcacgatcgtcttgtagccattggcgagaagcatgcggtttacgatctgcccgaagcggccaaggccggcgatgatgacggaacccggttcgggtatctcgtcggcctcttcctcctgccgccggtcgaagcgcggcacgatcagcctgtcgaagatgatgaagagggccggcgtgaacagcatggaaaccgcgacgacgagcaaaaggatcgccgccagatcgggcggtatcacagcgctttgcactgtgaacgaaatcagcacgaaaccgaattcgccggcctgcgccaacccaagcgcgaagagccagcgatcgggcccgcgcagtttgaaaacgaaggccagcgcgaagagcacgatggccttgaggagcatgacaccgagcgtgatcccgagcacggcccagatttgtgcgtaaagcagtgaaaagtcgatgctggcgccgacggtgatgaagaacaggccgagcagcaatcccttgaatggctcgatatcgctctcgagctcgtggcggaattcgctgttggcgagcacgacgccggcgaggaacgtaccgagcgccggcgacaggccaacgacggtcatcagcagcgcgatgccgacgatcagtaacagcgccgcggcggtgaagatttcgcgcagcctggagcgggcaatgaggcggaagatcggccgcgacagatagtggccggcggcgatgacgaaggcgacggcgacgatcgtcaccagcgttacctgccagccgggcagcccatcgaccaggctgagcgatccatggccgccgccctcggcattgccggcaagcgggcgccgcgcgagctccggcagcgccagaagcgggatgaaggccagcatgggaatgacggcgatatcctggaacagcagcacggagaagctacactgtccgcccgacgagcgcagcaggcccttttcgccgagcgtctgcagcacgatcgcggtcgaggacagcgagaagatgaagccgatggtgagcgcgacgctccagacctggccgagaagcatggcgccgcccatgaccacgagtgcggtgacgacaacctgcaatccgcccagcccgagcagcttggagcgcatctcccacagcgcgcgcggctgcagctcgaggccgacgagaaacagcatcatcacgacaccgaactcggcgaaacgctgcaggtccagcgtttcgttgccgaccagatgcagggccgggccgatgacgataccggcgatcagatagccgagcacggaaccaagccccagcctcttggcgatcagcacggagacgacggcggccagcagatagatgaaggcctggaaaatgaagctattcatggggtgtgctctcacgaagcggaagcgtttcggcgctcagcaactccattcgggcggcggcgtcgatgtcgaaggtttcgtcgcgcaaggcttggagcagccgcccgtatccctccagatgcggatcggcccggccgtcgccgcgcgcatcgtgcgcggaaaacagcgcgtatggcgcgatgaagcgcatccggcagagatttgccgtctgctccagcggcgaaagcagggcccgtagacggaagtggttgcggccttcttcggtgtaggcgtgatccgggccgccggaggtgatcacgggcaggaacaccttgcccgccagcttgtctcccgtgtgaccataggcgaaaccgtattccagcaccaggtcctgccactccttcagaatggatggcgtcgagtaccagtagatcggaaactggaagatgatcacatcgtgcttcaaaagccggtcctgctccacatcgatgtcgatatcgagctttggatagtcggcgtagaggtcgacgaaggtgacgccttcgatgccgccggcgatcttggccatcaggatattgacgcgcgaatggcgctgtccggggtgagcgaagagcacgagcaccttggccatgtatgggctcccatctgaattcgaagtgcgtgagatccggggccggatcggctctacctgttcagtttggtctggcaagtcaaccatgatttcatcggcatggcaccagcccatcgttcgggcgctcaaggaaaaagcgccggacgtgttcgcggccggcgcttccagtttttccagagtgaatgatcagctttcgatctgaaggttggcgtcccgcgccgcggcgatcagggcctgcctcgcatggccgccgccacgttttccctccatcacggcggcgcacgccctgagcgcgcggacgaacgcgtcgcctgtcagcaccggccatttgtcggcaagcagccaagccgcgtcgcgtgcgcttttcacgacgtatttcaccgagccgatcgcgattgtcagcggtcttttccaaagcttttcatcagtcatgcatcacctcatcggcggccttaacgccggccggcggatttggttccgctcgctacgtcagatgaggtggtgctcataaagcatctgctggacgagcatcgtgccgcgcaaaaatcacggcgcgacgcattgggggcgtttgatggcgtttttgttcatcgcacacggcgtcgttttgagtgaagatcagctcttctcttattggtggtgcagatcgatggcttcgcaggatcccctacttcaaccattccaattgaaacatctcgtactgaagaaccggctgatgtcgaccgcgcacgagccggcctattcggaagacggcatgccgaccgaccgctatcggctctatcatctcgaaaaggccaagggtggcatcgccctgaccatgacggccggctcggcggtggtctcgccggattctccgcccgccttcggcaacctgcacgcctatcgcgacgaaatcgtgccatggctgaagcggctgtccgacgactgtcacgagcacggtacggccgtgatgatccagcttacccatctcggccgccgcaccggctggaacaagggtgactggctgccggtgctggcgccaagtccgatccgcgaacccgcccaccgcgcattccccaaggaggccgaggattgggatatcgaaaggatcgtcgacgactatgtttcggccgcgcagcgcatgcaggccgcgggcctcgatggcatcgagttcgaggcctatggccacctgatggacggcttctggtcgccggccaccaacatgcgcgaggacgaattcggtggcgggctcgagagccgcatgcgtttctcgacgatggtgacggaggccgtgcgcaaggccgtcggtcccgatttcatcgtcggcatccgtctcgtcgccgacgagcagtgggacaaggggctgtcgcgcgaggaaggggtggagatcgccagaaggctggtggccggcggatcgatcgactttctcaatgtcattcgtggccatatcgacaccgacgccgcgctcaacaacgtcatccccatccagggcatgccgtccgcgccgcatctggatttcgccggcgaggtcagggcggccaccaaatttccggtgttccatgccgcccgcatttccgacgtggcgaccgcgcgccacgcgatcgccgaaggcaagctcgacatggtcggcatgacgcgtcctcacatcgccgatccgcacatcgtcagaaagatagaagccggcgaggaggcgcgtatccgtccatgcgtcggcgcgacctactgtctcgatcgcatctacgagggcggcgaggcgctctgtattcacaacgcggtcacgggccgcgaaacggaactgtcgcacgagatcgccgccgctgcgtcgccacggcgggcggtggttgtgggggcagggccggccgggcttgaagccgcgcgcgtgctggcagagcgtggccacaaggtcgaccttctggaggcgagcggagaggccggtgggcagatcaatcttctggtccgcaatccgaggcggcgcgagatggtcggcattgtcgactggcgcctggaggaactcgagcgtctcggggtcgcgatacactacaacgtctttgccggcggcgacgacgtcctggccttcgagccggatctggtcgtggtggcgaccgggggcatcgcgcagtcgccgacgctcgatgccggcgacgggctggtcacctcgtcatgggatatccttgccggctcgacgaagccgggcgacaccgtgcttctgttcgacgacaatggcggccatcccggcatgtcggcagccgaggtcatcgccgcgaccggcgcggaacttgagctggtgtcgccggagcgcttcttcgcgcctgagatcggcggcatgaaccatgtgccctatgcgaaggtcttcgccgaaaacaacgtcagggtgacgatcaacacccggctgaaatcggtgcgccgcgatggcaaccagttggtggccgtcctcggctccgactacgccgaagccacggagtgggagcgtcgggtgtcgcaggtcgtcgtcgagcatggcacgatggccaatgccgatctctacttcgagctgaagccgctgtcgcgcaatctgggctcggtggactacggcgcgttgatcgcgagacgggcgccgttgccgcggcgcaatccgcaggggcgtttcgatctcgttcgaatcggtgatgccgtggcgagccgcaatatccatgccgcgatctacgaagccttccgtttcgcatcacttctttgagatcaggtgcgacaaggatgatcttattgcgactgccgttccatcagaacattgaaagaaacctccaatgcgccattttttgacgcaatcggaatggcgcatgccgagccaatgacggctcaatggggaggctggcggacgcggtgctgccggcgcccgggttcacgttgcaccgcgaccagagggaacaagaaaatgaaaatgcttttggcttccaccgtcctcgccgccggcctgcttggccttggcggcgctgcatccgccgccgaatgtggtgatgtcaccatcgccaacatgaactggcagtccgctgaagtggcggcgaacatcgacaagctgatcctcgaggcgggttatggctgcaaggccgaactggttgtcggcgataccgtcccgacgctcacctccatggccgaaaagggccagcccgatatcgcgccggaggcttgggtcagcctgcagcccgagatcgtcaaccgcggtctgaccgacggaaagttcatcaaggccgcgaagattctgtccgacggcgccatccagggctggtggattccgaagtatttcgccgacgccaatcccgacatcaagacgatcccggacctgatgaagcgtccggatctcttcccggcgcctgaagacaagagcaagggtgccgtcttcaacggtccgcagggctggggcggcacggtcgtgaccgcgcagctcttcaaggcatacggcggcgacaaggccggcttcacgcttgtcgataccggctcggccgccggcctcgacggctcgatcgccaaggcctacgaagccaagcaaccatgggttggctactactgggcgccgacagcgcttctcggcaagtacgagatggtgaagctcggctatggcgcggaatatgacgccgccgagtggaagcgttgcacctcggtcgccgattgcgccgatccgaaggaaaacgcatggccggccgacaatgtcgagacgctggtcaccaagaccttcgccgatcgcgccggtcccgatgtcgtcggctacctcaacaagcgcgcctggaccaacgataccgtcaacaagctgatcgcctggatgtcggacaaccaggccagcggcgaggaaggcgcgaagtatttcctgaagaacaatgaagcgctgtggaccacctgggtttcgcccgaggtcgcaacgaaggtcaaggcttcgctctaagcgccgcatcgacagcgggcggccccgattgtgggacgccgcccgcctacacaccggcgagacggccaacaataatcaaagccgccgccgattttgtcatggggaaccgacatggattggctctggaaatttccgtcgatggacgaggacatgctgcgcgccttgaagaagagcgtggacgaaggctttcgcgccttcacacgcggctatggcagcggcatcgaaaacctgttcagcccgctgcaaagctttctgatctgggctgaacgcctgatgacgggcatgccatggccgctggtgatcgcgctcatcggcgcgatcgcgtggcttgcgacgcgcagctggcggatcgtcgtcggctgtatcgtcacgctgctgctgatcggctatttcgacatgtgggacgacacgatgaagacggtctcgatgatcttcgtctgcaccgtgctctcgatcgcgatcggcattccgattggcatcgccatgtcgcgctcggatcggctgcagaagatcatcaacccgatcctcgacgtcatgcagacgatgccgagcttcgtctatctcattcctgtcgtcatgctgctcggcatcggccgtgtgcccggagtgatcgccgtcgtcatctacgcgctcccgccgatgatcaggctcaccaatctcggcatccgcatggtcgatcgcgacgtgcttgaagccgccgacgccttcggctcgtccagctggcagaagcttcgcaacgtgcagctgccgctggcactgccgacgatcatggccggcatcaaccagacgatcatgatggcgctcgccatggtggtcatcgcctcgatgatcggcgtccagggtctcggccagccggtcttgaaggccatcgccaaccagtatttcacgctcggcgtcttcaatggcctcgccatcgtcggcatcgccatcatcttcgaccgcatcagccaggcctacggtctgcgtctgcagaagcaccgggaggtcgtccatggctagccagtcgatcaatatccgcagcctttacaagatcttcggcccacgcgctcgcgatttcgtcgaacccgtcatgcgcgggatgtcgaagaccgagctcaaccgggaacacggtcatgtcctcggcctgaaggacatcaacatcaccatccccggtggcggcatcacggtcatcatgggtctgtcaggctcgggcaaatccacgctgatccgccacatcaaccgcctgatcgatccgaccgcgggcgaggttcgctatggcgacgtcgatgtctgtcgcatggacaaggagcagctgcgccagttccgccagaagaagaccgccatggtcttccagaagttcggcctgctgccgcatcgaaacgtgttgcagaacactgtctacggccttgaaattcaaggcgtcgggaaggacgagcgcgaggagcgcgcgcagcactggatcaagcgcgtcggcctcgaaggcttctccaatcactatcccaatcagctgtcgggcgggatgcagcagcgcgtcggccttgcccgcgcgctgaccaacgatgccgagatcctgctcatggacgaggcctattcggcgcttgatccgttgatccgcgtcgacatgcaaaccgttctgctcgacctgcagaaggagctgaagaagaccgtggtcttcatcacccacgacctagacgaggcattgcggcttggcgaccggatcgccatcctgagagatggcgaggtcatccagcagggcacctcggccgatatcgtgctgagacctgccgacgagtacatcactgccttcgtcaaggaagtgaaccgcgcaagggtcatccaggtcgatgccgtcatggcgccgccaacagcatcggccaagtccgcccttcgcattcccaccggcacgaccgtcgaggaagcgctgcggcagctatcggccgcgaacgcgacaatggccgccgtcgtgtccggcgatggacaggagatcggcagcgtcagcatgggcgaactgatccgctgcctcgtcggtcaggagcccggcacatcgcagcaggcctcgccgacggcggtggccgaggcgatgtcggcgatcccttgatcggcggcgacgcagtatcgcactgacttgaagcgtgcgcggtcggccaaaagcacggccgcgcatttctctttcagcccaatcgcttaggtgcgcgcgatccagtcctggttgaaatcggcgaaggatgcggcggggagcggcccggcggtcatcagcgtgaagtcgaacgcggaacgcagatcggaacccagcacgtattggcggtgcacgcgcaggaaatcccggcggatcttgcgatagtgttccttcgtcagcatgtggcgcatgcggatcgtggcgatcgacgcctgcggcgcgtcggcgtgtccgcagagtgccacgacgcgcgacttgtagaaatggatcacgtcggtgagacaatggatctccagccagaatatctggctgttccgcgcgatcgcgccaactcttgcccgcaggctcctggcggatcgcaacagcgcacattgcagaatggcgccgccgagcgttacgaagaccacccgcttgtcggcgaaaagctcgggctcatcctccaccagcatgccgatgacatggcaggcgacgctcgatcccatgctgtgcgaggtgatcacatactcgtccgcatcctcgcgcaacgcgtcccgcacgcgcgccttgcaccggtctagccattgaacgatagcgggatcgtcgagctttgccagtgcgacagccagatcccagtccgcgaagagatgcagcgtgtggaacctcgcggcgaagggaaggaagacgaagcggaagaaaacaacggcgagcaacacactccagagcaagttccagcgctgaagtccgagaagagaaggagcggctgcgatcgtggcgctgagcgccaacgccagcaggaccagcgcgaatggaaatacgaagaacaatccgaagcgccaggcatgccggaaatagccgacaagcccgccctggacgatgacgcgggcggcgctcgcgtatcccgacgcgaggcgtcgtatcagagccttgtcgctatatctgcgcacgagttcgttgtggtcgaaaacgaagacgcgggtcgacgtcgtttccttctccgcgccgcagctgacgtcgaacgggccgccctccctgaaggcgccgacattcacgtcgaggctccaggccttggcgctctgcctggcggaccttgcgtagcgagcatggtgggccttcgaatcgagtggctcgaaaccgggaaaatgcaggacgacacgtttttccacgggaggggtggccacggggttgatggcggttttttgattcaatgtttatgaccctggcggaaaatcggaatgcgacgaccggcctcttgtcgatgggccatgtcgctcttacggacgatgacggatggcagaccactgacatcctcggggattgcgccagtccagtcgcgaggactgaaacagaaaaccctaaaaaatgagtggttgtttcgaagctcatctacgagccgaccatggaaacaacaaggcctttcaccattcttttcgtcaaacgcggagactttccgcgacaaggtcgacatttttccggtatcgcgttgcatataggcgacggctttcttgctgctcatggaaaattgcgcgatatttcaagggattggattgcgcacaagagggaggctgtcggtgacccgcgccacgaccatggttcaaggatctcgcggttgaagacggcgcggcggctttccgtttccggcacgccgagggcgcgcggcccgtcggacgggcgttccggcatcagcccggtcgatatcgccgatcacaactcccgagcgacgctcggcctgctgcgccgcttcggcccgctgacgcggcaggagttgtcgcgacgcctcgggctcacggaacctgcgatcgccgggatagtccagcgcctggcgacttcagggcttgttaccggccgtaagcgtgccagcgcgacgcgctacgcggcgctggagttcacgctctgtcccgaggccgcttcctcgcttggtatccggatcacccccgagggaggggagatcgtcgtcatcgacctctcctgcacgatccgcgcacgcatcggcttcaccgatgtcgacgagatcggcgaggcgatcacaagcattcggcatgccgtgtcgggccggcttgccggctgcggcgtcgcgcttgcgcccgggaccgtcatcgatcgcgccgcacttgcagacagcatcggccagacgggcgggccgctttatgttctcgacgacagcgaagccgcgatcggcgcggagcgcgcgctcggcatcggtgacccggaaggcgggctggtgaccatcctgatcgacgggacggttcgtgccgggcttctcatcggcggccggccgtttcgcggtattcatgggcttgccggccagatcggcgacatgcggtcgggcgtggatggcgcgacgctgaacgaggttgcgacgctgccctcgcttgaacgccacatggcggtcgcaagcgcctcgccggatgcctggatcacggttgccgcccgccaccttcacgaagcggttctggcgatctccggcttcatcgcgccgggcgcgatcctcatcggcggatcgctgcccgatggcatcctggcctccgtgatatcgagcatggcgcgggagcgggaagagaaaatccgcgatctggtgatcgctccctggatcccggtggtgcagccggcgacgcatccgagagacggcgtggtgctgggcgccgcccttcgacctttcaacgacacgctgtttcccgcctgaccgcgttatccgaccgcgacctcttgcgttgccgcgggccatcgtcccggcccgttcgcgaggccaccgatcggattgcggaaccgctgcgccggttcggccgacggcagcccgagacgatgcgcgagcggaatggccgcggcgccgagcgccgccgcatcctccgagccggccgcgcgatgcagcgacggcgcgttggcgccgaggcggccaatctcgtcgtgaacatagagcagcagttcatcgatgatgcggacgggaaagcgaccgccgatgagaacaccctcgggatcgacgatcatgccgatatgcacgaccgcctgggcgatcttgacgctcaccttgcgcagccatgcgctgacgagcgcgcgcccgcttgcatcgagcgtcaacaggtcagccggggtggaagcctcgacaccgttccgcttcaggtgatcgaggaggatgaagagcgagaacatctcgccgagcggctgcgtgctgccggcgaaggggccgtcgtcgaacagcaccggcaaccagccgatttcgccgccgatcccgctggcgcccttgtggcggatgccatcgatgacaaggctgccgcccagacaggcattcgcgaggatgtagaagaagctgccgatctcggtgccgagcccgtattcgatttcgccgagagccgccgcgttggcgtcgttgtcgatgaacacggggtggtcggagatcgcctccagcgcgccgcgcacgtcatagccgctccagcgccggtattccggcggaaagccgatgacgggcacttctccgagccagtcggggatggcgaggccgatcccggccagccgactttcctcgataaccttgcgccgccggaaagaggagagcgcgtcggccatcagcgcggcgaaatcatccggcagcagaaaccgcgcctcgtggtgaatgcggccgcgcaccgtaccgacagcgtcgacggcgacgatggtgaggtgatcgcggtcgatattggcgccgatcgagaacacgccttccggatcgatctccagttcgatcgccggctgcccgcgcaacccgtgccgccgccgcgcctccatgacgaggccttcgtcgagcaggcgctcgacgatccgcgtcacggcctgcttggtcagccgcgatcgcgccgccagttcggtgcgcgaaatcggcccgccgcgatggatcgcgctcaggatcatggcccgattggccgccgccgcctgctcaggattggaacccgaaacctgcaacttccgtcttctcccttgggcgctggacctgttgaatcgctacaagatctatcgagactaagtcattgtgtcgtaaacggaaagagcccagccactccgtgaccgggctccgacgatccacctgacgtcggttagcgcgaaatacgccagctcttcacctggaacggcatcaatccctcgaccggcacatcgcgcatcggctcttcgagaatgctcaccgttccctcgttgcgccatccctgcggtagcgtcaggccgaaggcgccgcggcggcctgctggctcgtaaacgcgcaggatcaggccatcgccatcctcgcacggcttaatcgccgacagagccgcgccgataccctcggtcttgatcggctgccatgccccgacggcgcgatcggagacggccatcgccagcagcggctggttgaggtcgtcggcttcctcgcgcacgcccccctcatgccaggagccctcgtgcggcatcagcgagtaggtgaagctctgcagcccctcatcggccagcgggtcgggatagatgggcgagcgcagcagcgagaggccgagcacgttgccccggatgctatgcccatacttggcgtcgttgaggatcgcgacgccgaagcccggctccgagagatcggcgaagcggtgtgcgggcgcctcgaacatcgcggcgtcccaggacgtattggaatgcgtgggccgctcgacgacaccgtaggcgcattcgcaggtggcgcgtgcgttgcgtacggcaacatcagtcaacgtccgcaagaaggcccggcggtcgtgccagtcgagctcggtctgaatgtccagccggcgggcattggcgccgagcgacaggatctgggtgatgcgcgaatggcgccaggtgcgcacgatccggatcgcggcgcggtgcgcggtattttcgatcagctcgatgctatcaagcgcggtgatctcctcgccacgcgcggcataatcctcctcgacgtcccaggcgtcccagttgcgcggcttgtccgccgggtagacgaacagccggttgccggcgccttcgagcgcctcgcggccgctcggcttgtgcaggatgctcgaaatcgagccgtccttcgccagcgtcaccttcagcgtttcgttctcgaggtggttgttgctggccgaaaggcccggtcgcgccttcagcgaggcaatgtcgatgacggcgatggcgaggggcgcgatgctgtcgcgtgacgagacgtgactgccatcggccagcgtcagcctgacgggccgctcgtcgagcgacgggttgaccaccagcacattgctgccgcttcccgatggcagctgtttggcgatggccgcgagcgcgcttgcctgcgcggcctggccatcggcgatcacgccgtcgagttcttcagcgctgtcggcgtagacctcggcgatcgaggagcccggcaggatgtcgtggaactcgttcttcagcacgacgcgccattcgttctccagcgaagcaggtttctcgccgcccatcagatgcgccagcccggcgagtgtttccgccgtgatcaggctgcgttcggccttgcggtgcaggcgcttgacgacgctctggctggtcagagtcgcgcggtgcagctcgagatagatctcgccctgccaggtggtgagctccttttccgcggcactcttgtgcgcgccctcgaagaaatcgtgcaccttcgtccagcgcgcggcgggcaatgccgggaaggcgcgcagctgttcctcgcgggcgatcatctccggcgtcacgccgccgccgccatcgccatagccgacggccagaagcgtcgtctcgtgcttgtccttctgctggaagttccgccaggtgggcacgaagcaatccggctgcacgaagccgttatagccatgcatcgggttgtcgaaggtgtgtgtcagcacccggctgccgtcgaggccttcccaccagaagaggtcggccgggaatttgttggtctccgaccagttcaccttgatcgtgaagaagctcttcatcccgccctggcgcagtagctggggcagggcgccggagaagccgaagcaatcgggcagccagcacacggtgtggcgaacgccgaaggtcttttcgaagtagcgctgaccgtagaggatctggcggctgaggctttcgcccgtcggcatgttggtgtcgggctcgacccacatgccgccgagcgtttcccattgcccttccttcacgcgctcgacgatgcgcttcaacagttcgggatcgtcctcggcgatctggttgtaataatgcgccgtcgactggttgaagcggaagtcggacgactgctccatcagcgcgagcgccgtgtggaaggtgcggcgcatcttgcggcgggtctcgcggtagggccacagccaggcgaggtcgatatgcgcgtgaccagtcagcgcgatctcgccctgcggcgggaagcgctcgcgcagctgcttcagttccttgatcaacgtgtcgtaagccgcgaccacgctggcgcgctgtccctggttgaggccctcgggggcggtttcgagctcgggcagccgccagatcttctgctgcccgaccgatggcgacatgcgcgctatgtaggctgccgtcgatgacggccagtcgagcccgcgcatggcggcctcggcgatgtcgatcagatgcggaatgacctcgtgtccctccagcgtgtcgaccgcctcggagatctggcgcaggagcagccacagccggtcgaccggcccatcgagccacaggaggttcgcccgctcgagccgaggcgcgcggacaggctcgccgaacggcagacgcgcgaccgtctccgaggagattttgatccggcgcgacgtcaggcggaattcctggtgataggggtcgaggccaagccgcgtttcgtggcccgcctcgtcggcgatggcgatgaggctttcgccgccgagattgaggctgagacgggcctcgtcaatcggccaatgttcggggagacgcgccgaggcggcgaagctcaccgtgccatccttgcgcggccatgcgtcgccgatcgcgatcggttcgccatcgaaggtccagtcgccgatctgaacggtttcacgggcgcgccagtgttcgagttccgacatgcggacgcggatgcggtcgaggcgttgggcaagcgtaagcgacatgatcatatcctgaggtttgaaagatatcagcccttgacggcgccggccgtcatggcgccgagaatgaggcgttggagcgaaagaaatgcgacgatggcgggcacgaccgacacaaggcaggcagccgccaacagctggatggagctgtcgttctgggtgccggcatactggaagatgccgacgccgatcggcatcaacgcttccttgctgatcagcaggaacggcacgaggaattgcgaccagccggcgatgacggagatgatgaaggcggacgcgatccccggcgtcgccagcggcagaatgatccgccagaagacgccgaaatgactgcagccatcgatcagcgccgcctcgtcgaggctgcgcgggatgccgtctatgaagcccttcaaaatccatgtgaccatcggcacggcaagcgcgatatagaccatcgtcgcgccgaaatggctgtcggtgaggccgatcttggccatgtagcggtagagcggcaccatgatgaccagtggcgagatcatctggaaggcaagcagcaccatcatccacggtcccttgccgcgaaagggaaagcgcgagaaggcataggcagccggcaatgccacgatcaggcagccgatcgcgctcgcggatgacagaagaagcgcgttccagagatagcccgcgaacttgtcggaggagaggatcgtgatgaaattatccagcgtcggcgatttggggatcagcctggagacaccgagaaaaacctccttgcgggtgcgtagcgccagcgacagcagccagaccagcggccaggcgaagaaaaggaaggtgatcagcaggaagagatagctgaagaggtcgccgatgcgttcctgtctcgaattgatcattggggctctcccttcggcaggaagcgggcatagacgagcgccaggctgagactgatgacgagcatcaggatcgagagaaccgcgcctgccgccaggtcgtaattcctgaagacgacgttgaacgtatagagcgacaggacctccgtcgcccggcccgggccgccgccggtgagcgagatgatcgcatcgaaggtgttcagcgtctggatggtgatcaggatcatgttgacgaggatcgccgcgcgcaactgcggcagggtgatgtagatcatccgctgccagggattggcgccgtccatttcggcggcttcgtagagttccggatcgatcgccttgatggcggcgtacatgacgaccatcgaaaatgccgttccgcgccagacgttggagatgacgaccgaccacatgaccatgttcggatcggacaaccactgaaccggcgaggcgccgagcatcctgagcaggctgttgaggccgccgaagggcgcttcgttgaacagcatcttccagatgatgccgccggcgatcccgggcaccacccaggcgaccagcgccgtggtgcgcacgatggtcgagccgaacaggccgcgcttttcgctgcgcacgacgacctgtgcgatgaacaggcccagcacctgttgggcaacgacgctggaggcggtgaagacaagcgtcacccagaggatctgcagcaattccggcttggagagcgtgttggcgatcgtccgcagcgtgtattcctcgtcgtcgccgacgagcgatatgttggtgaaggcgaagcggaagacgtcgatcagcgggtagagatagaagatcccgagaactaggatcagcggcatcagccagggcgcgggcgaggggtagaattttcgcgccgcaagcctgcttccggtaggcgcagtctcggcggcaatgctgagattggtcatcgatccgtccggtcatctgtcattgacgatggcatttccgtcatcggtggcgcgggtgaggttgccccgcgccaccgatcatcagctcagctccgtttgaaggcggtgagcgaggcggtaaaggcttcgtcgacggcggcttccgtcgcctgggtgccggtcagcaccttgcccatcatgatctggatctggttcgatatctcgggatagacggcggcccccggccgcgcctgcccgaccttgagcgcctcggcgaaggtcttgttcgccggcgtcgagaacacctcgtacttctcgtagagatcggcgcgcgtcggcagctgttcctgcagcgcgttggccgggcccatatagatttcgcgggcgaggtctgcgcaggccttcaccttggcggcatccttgctgaaggcggcgacagtccagccgccggtgccggtagagcgctcattggcggtcgggccggggagcggcgagaaggtccacttcgcgaattcctcctcgtcgagcgcggtcttcagctgcgcgtactgccagttgccgccgacgaacagcgccgtcgttccggcggccgcggcggcattgaagtcgtcatagctgccgagcgtcgcgacgcgcttgggtgcagcacccgattccaccagatcacggtagtagttcacggccttgatgaacttttcgcggttgtcgccttcgccgaagatcggcttgccctgatcgtcgaccagcttgccgccctgaccccagaagttggcgagccagtcgaaggtcgtgccctcgtagcgactgccgttgaaaaggataccctccatgccctcgtccaccgaccgcagcgccgccttcttcaggtcgtcccaggtctgcggcgcgtctggcacgatttccttgttgcggtagaggacgcgcaggtcggtcgaccaccaccaggcatagatgttgccgtcatcgccggtaattccctcgcggatgaagggaaacagctggccgatctcttccttgctgaagtagggcgagaaggattgcagcacgccggatttcttgaagagcggcagcacgaaggaatcgaccgcggcgcaatcgggcgccgacccggacttcgcctgctcgagcatgcgggcctgctcctgtccgatatcacccgacatcatctgcagctcgatctgccagtccggacgcttggcaatgaagtcgttgaagagcttgctgtaaccctcggcataagcaggctcgttgttgcgcggcccgtcggtggtcatgcggaaaatgagcttgttgggcgcatcggccttgccgacgatgtcgcccgtgatcaggtcctgagccgccgcgacaacaggcgcggccaggaacgaacccgccagaagggcgagcatgattgccttgttcttcaccagtctttcctcccgattcaggatcccatccgagccgctgcctccacaacagcggatctcctccgatccgtcgactagattaagtcacttttcttttgtgtcaagcaggtggcaatttgcgcgaggttgcacgcgtggcgacaatgagggcattcacggtttggggccttgcatttgccgcggcggaaaagcattttccgatggagtaaaagccatcgtgaggaagtccaatgcgcgcggttcacaggttcgtatcagccggagcagtgataatcctggccgtgctcgcgtccgcatgcacgacgggcgccaactacaacgcggcggacaactactataatcctcgaacgtcggtgaacccggcttgcgccgatgggttcaggccgaccaacaactggacgtgcagctactgactttcacgccaagcgatggtcggtctcacgggtatcgctgcgtctgccgatcaatcgtgcgacgccgcaagtgcgatcgaatccgcgacctcgatacagcgatcggacaaggtggcggtcgccacgcgaaggtagtttcccggcagcacggagaatttcgtgccgggatgcacggcgatcccgcgtgctgcaagcgtcaccatggcgaagggctccgaggagaccggcacccaggcagacaggccggcgccatgtgccgcgtttatgtttcgatcgcgcaatgcctgcaccaggtcatgtcggcgccgcgcatatatcgcgcgcgctgtccgcaccgtctcctgcgtggccgggtcgcggatcagccaggcgcccgccgcctgcaggatgcggctcgtccagccggcgctgaagctgcggaacgactggatctgctcgacgatcggccgcgagctggaaaggacggccaggcgtagatccgggccatgggtctttgacagcgagaagatatggatcacccggtcagggaagatatcgcccatcgattgtctcggcgcatcggaaatgtcgcccacaccgtcgtcttccacgatcagcgtatcggcatcgcgcagcacctcggccaggctttgcatgcgcgaggcagtcacggtctggccggtgaccgaatggatgcgtggctgaaagacgaaggcgacggggcgataggccatcgcctggcgcagtgacgagggcagtggaccctcatcgtcgcactcgaccggaatgatgcgcgcgccgcgatcttccaggatatcgagcaggcgcatggccgtcgggttctcgatggcgaccgcggcaccgggcatgacaagcgcgttcatcagcgtgtagacggcgttgtagccgccgttggtggcgagaaacgcctcgggctcatagggccatgtttctcttaccgccgtttcgagctcgggcagaatgcggttgcgctcatagctattcaggttttcggcggatgcgccgtaggccatcgcatgctcgagcctcggcagaagcgtgacgtcgggaacggcggccgtcaggttcagcacgtcctcgccatagttgccggaactcgccagtcgctcgggcttggcgacgaagcggtcgccgctcacccatgttccattgcgcccacggccgctgatgatcttctggcgccgcaactcgctccacgcttcggagatcgtggccgggctgatgccgagcgcgaatgccaggtcgcgaatggccggcagcttggtgccgacggggagcgcgccgccccggatcagcgcgctggtctcgagcgcgatgccgcgaattgtccgatcggttattttttgggcaaaccaggatgcgtcccgactatcgctcattttttacaccacatttaatgttcaataacgtaataacatttgatcagtattatttgaacatttaacgatgcgccagacacgaaattttgagagtgaatgcagatgccgatcacacttcgccttgcccttcgcgactgggactacatgacccctctcattctcggcgacgtctcgtcgtcgaagctcgacgtcaaggtcgagcgcatcggcaccctggtctcgcatgtcggcaagagcgacacctgtgacgcggccgaaatgtcgttcagccgctatacccagctgcgttacgatggcgaccaaagcgtcgtcggcattccgaacttcatcatgcgcggctttcgccatcgctgcatcatcaccatgaaggacagcccgatcaccgagctgtcgcagcttgcaggcaagcgcatcggcgtcaccggctggcgtgattccggcaacacctggacgcgcgccgctctgcgccgtgaaggcgttcaggtggaggacgcgatgtggtatgctggccgcctgacggaagcgcatcctgttgtcgatcgcctcgacggcttcggccgccccggccggatcgaggctgcccccggcgaacgcccgatggtcgatctgctgcgcgaaggccagctcgacgcgatcttcactccgttcatgccggacggctattttgccagtggttcacctttccggcaggttctcgccgatttccgtagcgccgagcgtcgatatttcgatgaggtgggatatgtacccggcatgcacctcatcggcatcaaggcggagatcgtggaagagaacccctggattatcgccgagctgagccagctgatcgaggaatcgcagcggatgtggctgagcaagcgccgcaaatatgccgatacgtcgccgtggatgttcgacgagctcctgaagacctccctcgaactccctgcgaactgggatgaaaacggtctcgccgccaacgagaagatgatcgccgatttctcggccgagctgcacgcccagggcattcttgcccgcgcaatgacgccgctcgagcttttcccgttcgataccgacggcagccgtaccaccgcctaaacgcatgcaaccacgacagcatcaataaaggggaatgaacatgttgctgaagaaaatgacctacctcgttctggcaagcgccgtggcctccagtgccgcgatggctcaggatgcggcagtgccgaagcccgcgctcaacgccgaactgaacgcaagactgccggatgcgatcaaggcctccggcaagatgatctccgtcaacaacggttcgttcccgccctacgaaatcgtaaccggcacggaaatgaccggtgccagcgccgatctcaccgaagcactcggcgccgtccttggcgtcaagatcgagcatgagacggttggcggcctgccggcgctgctcgccggtgtcaattccggccgctatcagttcgccttcggccccgttggcgactacaaggaccgcgaagcatccaacgacttcgtcgactgggtgcaggaattcgtcgtcttcgcgacccagaagggcaacccgaagggcatcacctcgctcgataccgcctgcggccagcgcatctcggtcatggccggcggttccgccgagcgggtgatcaagacccagtccgacaagtgcaaggccgacggcaagagcccggtcgaagtccagtcctacaccgatcagccaagctccatcctcgccgtgcgctccaagcgcgcagacgccttcttctcctcgcaggcgccgctcacctatttcgtcagccaggccaacggccagctggaactgaccggcgtcggccagaagaacggcttcgaggatatctttcagggcgccgtcgttcccaagggctcaccgctcggccctatcctgatcgacgccatcaaggtcctgatcgccgacggcagctatgccgccatcatgaaaaagtggggccttgagaacaacatgatcaaggaacccggcctcaatctcggcgggcagcttcccaaatgagcaccaacaccacgaccaatgcaccgccttcgggcggtgctgagttccgcgacgtcgtcaccgcgcacacgccgttcagaacgggacgcctcgttctctgggcggtcatcgccatcgtcgtcatcgatttcgtctggatcgtcgccaacaacgagaatttcggttggccggtcgtagcccaatacttcttcgacccgaccgtcatcagcggcctctatgtcagccttggcctgaccgtcatcgccatgatcctcggtgtcgcgctcggcctgatcatcgcgatcatgcggatgtcgaacgaccggttggcgagcggcttcgcgtcgctgttcatctggttcttccgcggcacgccgctgcttgtccagctgatcttctggtacaacatgtcgacgctgtttccgcagctgtcgatcgccatccccttcggcccctcgctcatcagctgggacaccaacgcggtgatcacgccgatgacggccgccatcgtcggcctggcgctcaacgaagcggcttacatggccgagatcattcgcggtggtcttctgtcggtcgatcgcggccaggcggaaaccgccgaagccttcggcatgacaaagggcagggcgctgtggcggatcatcattccgcaggccatgcgctcgatcgtcccgccgacaggcaaccagctgatcagcatgatcaaggcgacctcgctcgtcagcgtcatcgccatggccgatctgctctattccgtgcagtcgatctataaccgcaccttcgagatcatcccgatgctgctggtcgccgtcatctggtacctgctcatcacctcggtcctcaatatcggccagagctatatcgaagcctattacggccgtagcgagcgccgcaatggcgcaacggccaagccggccgccgtcgccgccgcagaggaggcaagccattgaccgccgtctccaataccaagccgctggtgcaggcgcgcaacgtccacaagtccttcgatcatctcgaagtgctgaagggcatcgacctcgacatcatgcccggcgaagtcgtcgtcgttctcggcccgtcgggctcgggcaagtcgaccttcctgcgctgtatcaaccacctcgagtccatccagaagggctatatcgaggtggatggcgagcagatcggctaccgggtacgcaaggaccggctggagcggctgtcgcccaacggcatcgcccgccagcgccgcaagatcggaatggtgttccagcagttcaatctctatccgcacatgacggtgctgcagaacatcatcgaggcgccggtcggcgtccacggtgagaaccgcaaggatgccatcgaaaacgccaggcagcttctgcagcgtgtcggcctgtcggagaaggcggatgcctatccccgccagctttccggcggacagcagcagcgcgtggcgattgcccgagcgctggcgatcaagccgaagctgatgctcttcgacgagccgacctcggcactcgatccggagctcgtcggcgaggtgctctcgaccatgcgcgatctcgccaagcagggcctgacgatgatcgtcgtcacccacgaaatcggcttcgcccgcgaggcggccgaccgggtggtgttcatggacggcggcgtcgtggtcgagcagggcaagcccggggatgtgatcggcaatccgcagcatccgcgcacgcaggccttcctgtcgcgcttcctctgacgttcagctcatctggcgcgacgccgtgatgcaatcgaagacccggccggccctgtcgtggggccggcagcgtaccacgcatgcaaagaattggaacggacatgaccatcgacaacgatttcgcccgcctttcggatttcgagcccatggacgccgaactccgcgccatccgccagcatctgcacgcccaccccgaactgtcgttcgaggagacggaaaccgcgcgcttcgtcgccgaaaagctcgagggctggggctatgaagtgacccgcaacgtcggtggcaacggtgtcgtcgcccgcatgacccagggcgctggcaagaagagcatcgcgatccgcgccgacatggacgcactgccgatcaccgagcagactggcaagccatatgccagccaggttcccggcaagatgcacgcctgcggccacgacggccacacgacggtgctgctgggtgccgccgaatatctggcacgcacccgcaagttcaacggcacggtcaacctgatcttccagcccgccgaagaagccggcggtttcagcggcgcgcaggcgatgatcgaggatggcctgttcgaacgcttcccgttcgacgccatcttcggcctgcacaaccaccccggcgcgcccgagggcagctggctgatgcgttccggtccgctgatggcggccgccgacacggtcgagatcaagatcacgggcaagggcggccacgcatcgcgtccgcatctgacgatcgatcccgtcgtcgtcgcctgcaacctcgtcgtctcgctgcagtcggtcatctcgcgcaatgtcgatccgacgcagacggctgtcgtcacggtcggcgccatccatgccggcgaagtcgccaacgtcatcccggaaagcgcgagtatgcttttgacggtgcgctcgttcgatccgaaggttcgcgagatcctcgaaaagcgcatccgggcgctgaccacgtcgctcgtcgaaggcttcggcgcgaccgtcgagatcgactacgcctacggcaatcccgtcgtcgtcaattccgagaaggaaaccgagttcgcccgcatggtggccgaggaattggttggcgagggcaatgtcgcgctttgcccgctgatcccaggcagcgaggacttttcgcacttcctccagcacaagccgggcagcttcctgcgcctcggcaacggcatgaactcggcgatcctgcacagcgcgaaatacgacttcgccgatgacagcctgacggccggtgcggcgatgtgggcgcgcctcacggaacgctacctcgacgcgtgatcgtccggcatcgaagtccatgaccaaacgaagaaggggcgcccgaaaccggcgccccttctttcatgtcatgcagcccgaggcgcggatgcgccgccgacggaaaatccgttactgattggatggggtgccggatttctccgaggccgcctgggtctgggtctgcgtctgcgccatcgccttgacgagcgccacgatcttttcgcgcaactgcacgtcggtgatcttgatgaacgccttgttcagcgcgagcccttccttggaattaaggaattccgcgaccggatcggtcgtcaccgtcagatcgagtccggcgagcgaaaggggctccgacggatcctgctgaaagaagaaacttggcgtggtgttcatgacttcggcgatgcgctgcaggcggctggcgccgattcggttcattcccttttcgtacttctgcacttgctggaacgtcacgccgatctgctcggccaacctttcctgactcattcccagcaactgcctgcgcactctgacttgggaacccacatagctatcgattgcgttcggtgtctttgcattcatcctgtatttcctatgccggaatcgaagcgaaacagtccccggcaaaccggctcttcccagcaatgacagtttgtcttagcaagcgatcaaattcaaccgcaggattatgacgataaggtgatctgttggtaaaatgcgtgaagattcacgctatgagtgcgtgtcgctcaatctctaccgccgaaacggatcggtcggatgacgcggtgcacaatcttcagggtccggtcgggctggatcatgtaggtttcctcgacctcctggccatattggtcgatgaagctgtgcgggaaggtggagccgatcggcgacttcgtgagcttcgtccgcggctggccactatagatgatgctgccgggaatgggcgtgaggccgggtgcggagtaatccttgcccgtcgtgcatcctgccaggagagccagtgcgacaatcgcaaccacagtccgtttcatcgcgccctcacatattagcttcgcttaccccgtgaatatatggttgcggccgggaatggacaggcggtgacggcttatcccggatgttttttgatggcggcacgacgccgccatccgagctcgcctgcgctatgcggctaaagcagcccgcgcttcgccagattgaccatcaacgcgctgatgccgaaggtccatggcgggcagtcgtttgagcggcggaccgtgttgacaagcgagccgagcccggccgacgaaatctccacgacgtcgccgatcttgtgggtgaagccctggttcggcgcgtcgcggtcctgcgtcggggcgaacagcgtgccgagaaacagcatgaagccgtcgggatactggtgatgcgcgccgcaggtctggcgcacgagatcggtcggatcgcggctgatcttcgacatcgagctcttgccgtgaagcacgaagccatcttcgccggtgaccttcaggtcgagttcggcgctacgcacggcatcgagatcgaagctctcgtcgagcaggcggatgaaggggccgatggagcaggaggcgttgttgtccttggccttgccgagcagcagcgccgagcgcccctcgacatcgcgcaggttgacgtcgttgccgagtgcggcgcccctgatctcgccacggctgttgaccgcgagcacgatttccggctccggattgttccaggtcgagaccggatgcaggccgacatcggcaccccagccgacggaggagagcaccggagccttggtgaagacttccgcatccgggccgatgccgacctcgagatattgcgaccacatgccttcctcgatcagcgcctgcttgaccgtggctgccgcgggagaaccggccttgagattgttgaggctgccgccgatgagcgtgctgacacgctcgcggatcgcggccgcgcgatccggattgccggcggccttctcctcgatcacccgctcgatcatcgactgcgcgaaggtgacgccacaggccttgaccgcctgcagatcgaccggcgccagaagataggggcgcgagttgtccggcttgccggtagtgttggcggcgatctcctcgagtgttccgagagacttgcctttagccgagcggacgaaggccacgagatcggaccgctccagaagcgcgctcacggttgccgcctccttcgaggtgatgtcgatcacctgttgatcgcggatcgtcacgatgctggggccgtcggcggcaggattccaggcgcggccaacgaacagaccacccgtggcggcggcgtcgagaagggtatgaggcatgataattttccgtcacgcgagcgatggacgcgctctatgagccaaggatgcgccgccctccaacccagcggcagcgaaatcgatcacattcgccgacaacgggcaaggccggaatacgcgggagggatcgccgatccgcgaaaacgctcacgggccggcgcctctccggtcaccggcccatgattaatgtcgccgcttagtggttgtcgcgcgggatacccttggtctgggcgatccgctgatacttcaccgccggctccagcaccgcgccggtctccatctgcccgacataggagcgctggatttcctgccacggcgtctggctttccggatagacatagccgccggccgcaaccaattcggcgcgccgtctggcgatctcctcgtcgctgatcaggatgttggcggttcccttcttgaggtcgatgcgcacctgatcgcccgtctgcaagatcgcaagcccgccaccggcggccgcctccggcgatgcgttgaggatcgagggcgaccctgatgtgcccgactggcgaccgtcgccgacgcaggggagcgacgagatgccctgcttcagcaggtaatccggcgcgcgcatgttcactacctcggcggcacccggatagccgatcgggccggcgccgcgcatgaagaggatggttgcggcgtcgatggccagcgacggatcgtcgatgcggtggtggtaatcctccggcccgtcgaagacgacggcgcggccggtgaaggcttccgggtcatcgggattggagagatagcggtcgcggaactccggcgagatgacgctggtcttcatgatcgcggatgagaacagattgcccttcagcacgcggaagccggcgcgctccttcagcggccggtcgaacggccggatgaccttttcgtcctcgatcatcgaggccgtgtagttctcgccgaccgtcttgccgttgaccgtcatcgcgttggtgtcgagatggccgtgcttgatcagttcgcccatgacggcggggacgccgcctgcgtggtaatagtcctctccgagatattcacctgccggctgcaggttgacgagcagcgggatctcctcgccatgggtctgccagtcgtcgaccgagagttcgacgccgacatggcgggcaagcgcgttcagatggatcggcgcgttggtcgagccgccgatcgccgagttcaccttgatcgcgttgatgaaggcttccctggtcaaaatgtcggatggcttcagatcctcgcgcaccatctcgacgatccgcaggccggtctcgtaggagatctcctggcgatcgcggtacggtgccggaatggcggcggcacccggtagctgcatccccagcgcttcggcaagcgagttcatcgtggttgccgtacccatcgtattgcagtagccggtcgagggtgctgaggaggcgacgagcttgacgaagccctggtagtcgatctcgccgcgcgccatcatctcgcgcgccttccacacgatcgtgcccgagcccgtgcgctcgccacggaaccagccattcaacatcgggccgacggacaacgcgatcgcggggatgttcacggttgccgcggccatgagacaggccggcgtggtcttgtcgcagccgatcgtcagcacgacaccatcgagcggatagccgtagagcacctcgacgaggccgagataggagagattgcggtcgaggccggcggtggggcgcttgccggtttcctggatcggatggaccggaaactcgatggcgatcccgccggcatcgcggatgccttcgcgcacgcgcttggcaagctcgatatggtggcggttgcacggcgacaggtccgagcccgtctgcgcgatgccgatgatcggccggcccgactgcagctcttcctggctgaggccgaagttcatgtagcgctcgaggtagagcgccgtcatgtcgggattggccagattgtcgaaccaggccctggagcgaagctgcggcgccccggtcttctcgtcgattgcggtgtcactggatgaggcgggtgttttctcgaccacgatcattttccttggttttgctgcggtattgtcatgcggtttgccgatcgtcattgtcatcggcaagaatggcggattgtcggcgcgcgaaacggactgaagtcactccggcaacgtttacggcgctgcctcctcaggcaggaacgtattgcgagatgaagcgcgcgtcgcgacggaaatcggatggcgacatgccggcgatatggcggaaggatttgttgaaggcgctgatcgagccgaacccgctatccatcgccacctgcagcacattcgcctcttcgttcatcagcatcgcctgtgcgcgcgaaagccttagcaggttgacgtatttgctgagcgtcatgcccgtcgtcttcttgaacaggttcatcgcatacttcggatgcaggtccgccgcgcgcgcgatatcgaccgaatcgatctcgtgcaggaagttcagggcgatgaagtcgcacatgcgcgcgacgctgcgcgaggattgcggataggcctgctcgacatcatccgtcgccgaaagcccgttgggcgccagcatcgaataggggtcgagcacgatgcgctcgatgcgcagaagcatctcctcaacggcgtgctgcgccttggccgcatcgccggatttcgcgtaagccacccagcgcgggaagttctctatgtcggcggcgtcggtcgccgacgtgaagagaatctcgcccttcatcagccggctcgagatattgatcggcagccgcatgcgaaaaaaatagaccagcggcagatgcccgccggcatagatcgaatcatcgctgctttcgtccatctggtggggttgcccgccccagaacaggcacatgtcgccggccttcatgctgatgtcttggccgttcatgcggtagtgcacctcaccgcgcatgatgtagttcagctccacctgcacatgccaatgcggcatcagcatcggtggcggatggttgtgaaacatctggagtgccgtcggcaatccctcgatgctgctcgctcccggctgatagacagccctctgctcaatcttactttccgccaaatccatattccctttttaggagacagcggctcccttgcggttagtgtagtcacgttcgctaagggacggcaattgaaaagggaggattttcaatgcgcttcaaacttatcggtgcaaccgctgctgttgcacttcttgcatccggctccgccttcgcgcagtcgggcaatctcaccatctggagctggaacgtcgccgcatcggcgctgaagtccacgctcgaaggcttcaacaagctccatccggatatcaaagtcacggtggaagaccttggaaaccaacaggttttcgacaagatgctggcagcttgcgcggcgggcggcgagggtcttcccgacatcgtcacggtcgaaaacttcgaggccgaaatcttctggaaccgtttcccggattgcttcgccaacttgaaggacctcggctatacggctgaaatccaagcgaaattccctgagttcaagcgcaccgagcttgaagtgggcgatgtcgcctatgccatgccctgggattccggtccggtcgccgtcttctatcgtcgcgacttctacgaaaaggccggcgtcgatccggcgtcgatcaagacctgggacgatttcatcgccgccggcaagaagatctcggccgcaaaccccggcgtcgtcatggcgcaggccgatttcaacggcgacagcgaatggttccgcatgatctccaacgagcagggctgcggctacttctcgagcgatggccagaacatcaccatcaacaagcccgcctgcgtcgccacgcttgagaaggtcaaggagatgaaggacgccggcacgctgacggccgccatctgggacgagaagatccaggccaacaccgccggcaaggctgccagccagatgtatggcggctggtacgaaggcaccgtgcgctcgggctctcccgatctctccggcaagtggggcgtctacatgatgccgagcctgacggcggacggaccgcgcgcggccaatctcggcggctcgtcgctggcgatcgccgccaactcggccaacaaggaagccgcctggacctacatcgactacgcgctcggcaccaatgagggccaggtcgcgatgctgaagtccttcggcctcgttccgtcgctgctgtcggcggttcaggatccgttcgtcaacgaggcgcaaccctattggggcggccagaaggtctgggccgatattctctcgaccctgccgaagatcgtgccgagccgcggcacgcagttccagacggatgccgacgccatctacaaggcgacgcagaccaagtatttcgccggcggctacccggacgcgaaggctgcgctcgacgatgccgccaagcagatcgagaccgccaccggtcttcccatcgcggaatgagtgacgataccgggcaccccttcggtgcccggcttccatctctcgcttcgactttgaggagaatgaaatgccgatccggaaccggagcgcatatctgtttcttgcgccctatctgctggtcttcgccaccttctggctatggcccatcatcagttcgtttctgatctcgtttcagaatacgcgcgtaaacccctggaaattcagcgcttccatcaattggggacgcctgatcggcgatcccgccttctacaatgcgctctataacacgctgatcatcctggtgatccaggtgcctgtcatgatcgcgctcgcgacgctgatggccgtgctcctgaactcgccgctcctcaaggcgcgcccgctctatcgctttgccttcttcgcgcccgtcgtcgtcggcgaggtggcctatgccgcggtcttccggctgatgttcagcatcgatttcggcatcgtcaacaagctgatcacctcggtcggcctgtctcccgtttcctggttcgacaacgccaatgccgcgatggcgctcgtcatcatcgccgtcacctggcgctgggcgggctacaacgccatcatcctgctcgccggtctgcaatcgatccccgacgatgtctacgaggcggcgacgctcgacaaggtctcgaagaccaggcagttcattcatatcaccctgccgctgttgaagccgatcatcctgttctgcgtcatcctgtccgtcatcggcacgatgcagctcttcgccgaacctttcctgatcaccaatcgcggcggtcccggcggcggcaccgaaacgctcggcctgctgctctatcgccagggcttcctgtcgctgaacttcggctacgcgtccgcgatcgcctacaccatggccatcctcgccatcaccatctcgctgctcaatctctgggtcgggagggaacagaaatgaagtccaagtcccaatccaagatgctgcagaccgttctcttgcatgtggtgctgacgccgcttgcgatcgtctggctgtttccgatctggatgatgttcgtcttctcgaccatgcccgactacggcatcttcagccccgacatcgtgctctggccgtcgacgaacttcgtcgagaacttcaagaacctgcaggccgataccgatttcgtccgcgccatgttcatctcggtcgtggtggcctcggtgtataccttcctgtcggtgcttctgacctcgatggccggctgggcgctggcgcgctatcgcttcgtcggaaagtcgatggtcgtcgccatcattctcggcaccatcacgcttcccttcgccgtcgtcgtcatcccgcagttcatcatggtggcccgcgagttcaagctcgccaacacctgggtggcgctgatcgtcccgccgctcttcaactcgcttggcgtgctgttcatgcgccaggccttctcgatgatgccggctgaactcttcgatgccgcgcgcgtcgaaggggtcaaggagcggcagatcttcctgcgcatcgctttgccgctggcacgcccgacgatggcggcgctcgcaatcatcctcttcctggcgtcgtggaacaactacctctggccgctgctcatcaattccaaacccggaatgatgaccgcgccggtggcgctcggatcgctgatcggtctcaccaaggtttcatggggcggcatcatggcaggcgccatgttgctcaccgcgccgatcctcgtggtcttcgtgttcctgcaacgtcacttcatcgccggcatttcggccggcgccgtcaaatagtcggggaacgcctgatgtctgaactttctttgaaaaacgtggtcaagcgcttcggcgcgctcgagatcatccatggcgccgatctcgaggtgaaggatggcgagttcgtcgtctttgtcggtccgtcgggctgtggcaagtccacgctgctgcgcatgatcgccgggctcgaggatatctccggcggcgagatcaacatcggcggcagggtcgtcaacgatgtcgagccggccgatcgcgggattgcgatggtcttccagtcctatgcgctctatccgcacatgacggtcgagcagaacctgagcttcggcctgcgcatgaacggcaatcccaaggcggataccgaaaagcgcgtgacgcatgccgccaacatcctgcagatcaacgagctgatgcagcggcggcccaagcagctctccggcggccagcgccagcgcgtggcgatcggacgcgccatcgtgcgcgagccgcaggtcttcctgttcgacgagccgctctccaaccttgatgcggagctgcgcgtgcagatgcgcgtggaaatctcgcgcctccacaagcagctgggcaccacgatgatctatgtcacgcacgaccagacggaggcgatgacgcttgccgacaagatcgtcgtgctccggtccggcaacatcgaacaggtgggagcgccgctcgacctctacgacgatcccgccaaccagttcgtcgccggcttcgtcggctcgccgaagatgaattttttgaaggctcaggtggtggagacggcgccgggaaccgccaccgtcgccatcgccggcgagcagaacgtgcgcctgacgctgccgatcacctcggtggtcgagagggggacggacgtcactgtcggtatccggccggaacatttcagcgatgccgggcagggcgacacggatctgaccgtctccatcgacgtcgccgagcacctcggcaacaccagctacatctacgccaccacatcgagcggcgagcagatgatcatcgagcgccctgaatcgcgcaccgctgcccagcgcgacacgctgacggtcgggctcaccgcgaaacgcgtcttcctgttcgacagcgcgggcaaacgcctgcgctgaaatcactccatcccaagactctgatcccaagacttgcaactgaccgacatgaaagaagaggactttcccatgagttcagctcaaccgatccgctggggcatcatcggcccgggcacaatcgcgcgcaccttcgccgatggcatcgcgcattcgcgcaccggcaagctcgtcgccatcgccacccgcaacccggaaaagccgggcctcgctgaaaacttccccggcgctcgtatcgtcaagggctatgaggcgctgctcgaggatagcgagatcgacgccgtctacatcgccgtgccgcacaccggccacgccgaatgggcgatcaaggcgatccgggcaggcaagcatgtgctggtcgaaaagccgatcgcgctcacttcatacgatgccgacgccatctatcatgaagccaagaaggccggcgttttcgcgggcgaggccttcatgtaccgagtccatccgcagacggccaagatcgtcgagctggtaaaatccggcgcgatcggcgccctgcgcatcatccgcaccagcttcggcttcaacatgggcacgttcaggcccgaacaccgcctattcgccaacgagaccgccggcggcggcattctcgatgtcggcggctatccggtatcgatggcgcgcctgatcgcgggggctgccgaaggcaagccgttcgtcgagccggagaaggttgcgggcgttggccatctcggccagtcgggcgtcgacgaatgggcgtccgccgtgttgcagttccccggcggcgtcatcgccgaggtctcgtgctcgatcatggccaaccaggacaacacgctgcgcatcattggctcggaaggacgcatcgaggtcaaggacttctggtttgcctccggacacaagggtggtgtcggcaagatcgagctcttcaagggcaacgagcagcagacgatcgaggtcaaggaagatcgctggctctattccttcgaagtcgatgcggcgggcgatgcgatccgcgccggccggcaggaattcacctctccgggcatgggatgggctgattccgtcggcaatctgcgcgtgctcgaccagtggcgcgcgtcgatcggcctggaatacagcgtcgagaaggcggcgaagcgggtgaccaatcttgccggcgacaaggtcacgctcggcaacagcattcccaagcggtccatccccggcatctccaagcctgcctcggtcgtcaccctcggcttcgaattcttcccgaacttcgccgccgcctcgctgacgctcgatgccttctatgaagccggcggcaatgtcttcgatactgccttcatctatggcggcggcaagactgaaagcatcttcggcgactggcacacgagccgcaacgtcaaccgcgaggagatcgtgctgatcggcaagggcgcgcactcgccgctggtctatccggatatcatcgccaagcagctcgaccagtcgctcaaccgcctgaagacggattacgtcgacatctacttcatgcaccgcgacaacaccgacgtcccggtcggcgagttcgtcgatgccatggacgccgaggtcaagcgcggccgcatccgcggtatcttcggtggctccaactggacccgtgagcgcatggacgaggcggcggcttacgccgcgaagaacggcaagctggcgccggcagcactgtcgaacaactactcgctcgccgaaatgctcgacccgatctgggccggttgcgtgacgtcgtcgaccgacgaatggaagacatggctcaacgagcggcaggtgccgaacttcgcatggtccagccagggccgcggcttcttcaccgaccgtgccggtcgcgacaagcacgacgacgaggaaatcgtccgttgctggtattccgaccgcaacttcgtgcgccgcgaccgcgccatcgagctggcggccaagcttggccgcagcccgatccacatcgcgctcgcctatgtcatcgcgcagcagttccccgtcattccgctgatcggaccacgcacgatcgccgaactggaggacagcctctcggcgctcgatatcaagctgacgccggatgaggtgaagtggctcgaggcatagcgcctcgttctcgaggatgatgtgagaaggcgggaattcgggctccggattcccgccacgccaggactagcgccgcaacccttcgatgacggcctgatactcgtgggcaagcgagattgccgcttttgcaaccaccgggttgatcgaattccggtcaaccgccttcgagcacgtctcgaacaggccgcgcagctcgcattcgatctcggacagttcgggatattgccgcacgagcacctgcggcagcagtttcgctttcgttttcatggatttggcgccgagccatatatccggcgaggcgatcgtcgcgttcaggatggccgtctcaagctgtccggtggcactcacgatatcggtgaccaaggccgtcattcttccctccaaccaaaggaaccccgctgtagcgacgcatatctcgtgccaactgctaatatgccgccgagatgcggtggcacgcttgccgttcggttgacggagctgccccggcatatgaaaacggcacgcggatgcctgaatattagtcgttcgttaattagattttctcgcgccgtccccctcccaggaaccgaccggtaccttggaactttaccctcacgtgatggttgaatggttgtagatcacgcttgatctcgccttgacgatctgaagtgcgcacttccgcttttgaccggggcctcttgcccctggggctcatgccctttcaggacataacggaggagaaaatgatgtacttgaagtcaacgattgccatattggcggccggctgcgcgagcgtgctggttccacctcaggtcgcggcttttgatataggcggctcgaacggcatcagcgtcaacagcagcggcggcgggctcaacgtgtccgtcggcggcgccaacggtgtcaacgccacggttggcggcggctcgaatgtcgcgaatgtctccgtcggcggaacgagtggcgtgaacgccaatgtcggcggcaattccactggcggcctcggcgtcaacgcgtcggttggcggcaccggcgggatcaacagcgccacctcggtcggcggcagcaatcccacgggcggcctgggcgtcggcacgaccgcgacgatcggtggatcaagcggcgtcaatgccgatgtcgatgcaaccgtcggcggctccaatctcgccaccgtgggcgctatcgccaatgtcggcgcgggtgacaacacgcttgccaatatcaacgccaatctggctgtcggaggggcctcgacaggcgccggcgatggcacgcagccgagcctcgtcgatctcggcacgaccgcaagcatcggcggcacgaacggcgtcaacgcggatgtcggcgcgaccgtcggtggctccaaccttgcaaccgtcggcgcggtcgccaatgttggtggcggcgacaatacgctagccgacgtcaatgccaatgtcgcgatcggcggcggatcgacgggctcgggtgggggcggttcgacaaccggcagtctggtcgatgctgatgtgaccgccagtgttggtggcacgaatggtgtgaacgcggatgtcggcgcgaccgtcggtggctccggtcttcccagcgccgccgccatggccaatgtcggactgggcgataacacgctcgccgaaatcagcctcgccatcccgtccggcgctggatcgggcgggacggatccgggcacacccggcgtccccggtacgcccggcattcccggtggtccgggcgccggcaacaaccccggcgatgacgccaatggcgatacgggcgagcgcggccgcaatctggcgatgatcaacgacatgtccgcgagagatcgtgccaaggccaaggcaagctgcaaggacgtggttaggtccggcggcttcgatgccggcctcgtcagcctctgcaagatggtgatggcaagccgctgattaagctgaaactggaaaaaaaagggcgtcggtttcggcgtcctttctgcattgcttattcaaaaaggtcgggatgatccgcttcgatctgcggaagatccgacaagatcccgttgaggtgggtgcgcatggccgacgcggcggcgtccgcatcgcgtccatcgatcgccgtgatgatcgcctcatgttcggtgatcagccgcatcatggaatccggatggcgaagctgcagattgcagacccggtccatatgagccttgatgtcggaaatggcgttccaggcaaggccgcagccggcgccctcggcaattgcgatatgaaactgttcgtcctctcgcctgaatgcgttgtgatcgtgcgcctgcatggcggcccgctgcctgccgatgatcgtgtcgatccggcggcgcgtccagctgtcgaaactctcgctggcgcggcgcgccactgcggtctccagcgcctcgcgcacgaagcgcgcctccatcatctgccgtgccgagattcggacgaccacggtgcctcggttggggcgcacatcgaccagccgtgatttcccgagcgcgatcagcgcctcgcgcaccggctggcgggagacacccatgcgcgtcgcgatctcctgctcggaaagccgcgtgcccggcgccagttccagcctgatgatctgctcgcgcaggtcgcgttccacctgcgccgcagcggtttcgccggtctcaatcttcaaggattcgaggttcatgtctttcgtcgccgtcatccgttgacatccaatttaaaccaccatacagtaccatacaattcaaacgcaacataaatccggtggtccgaaaccgggtgaaaagggagggccggcacgatgtgtcggctttaagggaaacgtgctgtccaatttcattgcgcctgattccagtgatccgcggctgaacattaaatcccgctaccagatgcttgtcgatggcaagtcggtggatgccgcatccggccgcacgattgaccgtgtgagccccggtcacgcaggcgtcgtcgtcggcacctggccggaggcctcggccgatgatgtgcgcctggcggttgccgccgcccgccgcgccttcgatacaggcccctggccgcgcatgtcgggtgcggagcgctcgcggctgatgttcaaggtggccgacctgatcctcaagaaccaggaagagcttgcgctggccgaaagcctggaggtcggcaagccgatcgcccaggcgcgcggcgaaatcggcttctgcgccgacctctggtcctatgccgccggtcaggcgcgggctctggaagggcaggcgcacaacaatatcggcgacgatcgcctgggcctggtgctgcgcgaagccgtcggcgtcgtcggcatcatcacgccctggaattttcccttcatcatcgcctccgagcgcgtgccgtgggcgatcggcgccggctgcaccgttgtcctcaagccgtccgaattcacctcgggcacgtcgatccgcatggcggaactggcgcgtgaggccggtattcccgatggcgtcttcaacgtcgttaccggctacggcgatccggccggccaggtgctcgccgaagaccccggcgtcgacatggttgccttcaccggctctgtgcgcgtcggcaccaagcttggcgagatcgccgcgcgtagcgtcaagcgcgtcgggctggagctcggcggcaagggtccgcagatcgtattcgccgatgctgatctcgaggcggctgccgatggcatcgcctacggcgtctatcacaatggcgggcagtgctgcatttccggcagccggctcttggtccaggaaggcattcgcgacgcgttgatggagcgcctgctcgatatctcgcgcaaggtgaccttcggcgatcccctgaacgaccgcaccaagatcggcgcgatgatctcggaagcgcatgtcggcaaggtccattcctacgtggaggccggcatcgcatccggtgccgaattgctgctcggcggcgagcgcgtcggcaaggacaccggcatctattacgcccccaccgtgtttgccggcgtgaagccggagatgtcgatcgcccgcgaggagatcttcggaccggtgctctcgaccttgaccttcaagaccgcggacgaagccgtcgccctcgctaatgccagcgagttcggcctttccgcctcggtctggtcgaccaatctcgaaaacgccatgcagagcatccgccgcattcgcgccggccgctgctggatcaacagcgtcatcgacggcacgccggaactgccgatcggcggctacaagaagagcggcctcggtcgcgaactcggccgctatggctttgatgaatattcccagttcaagggcgtgcacgtgacgttcgggcgaccggcgccgtggttcggctaaagcatgtctcccgaaagtggtcaccggtttcgggataaagacatgcgacgaaacaagaagatgaagcgcatgagcgaatctgaaagatcgcgacgcgcttcagggaaatagagggatagggcgtttccgcttttgggagaaggcggaacgtccaggagggaaatctcggccggcgtgatctttggtcggagcccgccagccgagacttgggtctttcgacccgcattgcacatccaaagggaggatacgcaaatgaaattgaccaggttgaaaaccgcggcattggccgcgggtatcgccacgatgatgacatctacggcattggccgccgacgtcaaggcaacgatgatcatctatctcgatccgagcgtccagttcttcaaccccgtggtgaagggcgccaaggatgcggccgcgcaattcggcgtcgatctcgacgtgcagtacgccaacaacgatccggttcgccagaacgacctgatcgagagcgcgacggcggccggcgtcgatggtatcgccgtcgccatctcctcgtcggatgcattcgatgaaagcatctgcgcggccgtgaaggccggtatcgtcgtcatcggcttcaacaatgacgatcttgaaggcgccaagggcaattgccgccaggcctatgtcggcatgaacgaattctcatccggctacgagctcggcaaccggatgatcaaggaattcggcctgaaatccggcgacgtcgttttcaatccgcgcgaaatccccgaggcgagcttcgcggtcgcgcgcggcggcggtatcgagaaggcgatgaaggaaaacggcatcaaggtcgagacggttcgcgccgggcttgatccggccgaggcgcagaacatcatggcacagttcctgatcgccaaccccggcgtcaaggcggtgttcggcacgggctcggtcacctcgaccgtcggcgccggcgccatcaaggacgcgggcgtgaaggtcccgttcggcggcttcgatctcgcggtcgagatcgtcaatgcggtcgagtcaggcgcgatgttcgcgaccatggaccagcagccctaccttcagggttactacccgatcgcccagatcgcgctctcgaagaagtacgggctgaccccgaccgacgtcgataccggccagggcgccttcctcgacaagtcgcgcatcagctcggtcaagccgctgatcggcagcttccgctaaccgcgtttcgcgagaacctgccggcgacgccggcaggttctccgtcgccaatcgatcgagtaccagaccgtgacaccaatcctcgagacaagtgccgcgccccggtcgcggacccagaaacaaccgattatccggcagatcatggcgatgcccgccggcgcgatcttcctcgtcttcatgacgctgcagatcgtctgcatcgcgggcgccttgctctttcccgatcagttccgctatctctcgccgcagaacctgacgatcctgatgaaggcgatccccgtgctcggcagcctggcgctcggcgccggcgtgctgatgatcgcgggcgaattcgacctctccatcggctccgtctacaccttcaccgccatcctgatggcaagcctcgtcggcgccggattgagcgccttcatcgccgcgccgatcggcatcctcgcgggtgtcatgatcggccttctgaacggccatctcacgctgcgcttcggattgccgtccttcatcgtgaccctgggtggcctgttgttctggcgcggcgccgtgctgctctacaatggcgccgtccaggtgcgcttcgatccggagccgctcttcaccagcctgttcgccggcacgctcttcggcatcaatgccgccttcatctggatcgttctcttcgtgatcggcttccactacctccttcaccgtcaccgcttcggcaaccatgtcttcgcgaccgggggcaatcgtgccgccgcggaagcgatcggcatcaacaccaaccgcgtcaagctggtggccttcgcgatcgccggtggcatggcggcggtggccggcatcctggccacggcccgcgtcggaagcgtgcagccggggcagggcgccggactggaactgcaggcgatcgccgcctgcgtcatcggcggactgtcgctgcgcggcggacgaggctcgatcatcggcatcttcctcggcgtcctcctcatccacacgatcaccgacgtgctgctgctgctgcgcgcgccgggcttctatctcgacatgttcatcgcgacgctgatcgtgctggccgccatcttcaaccatcttatcgagcggcgaggtcttgcgtgatgtcggtccccaatcttcttgaactgcacaacatctcgaaaagcttcggcgcgctgacggcgctgcgcaatctgagtttccatatcggcgaaggcgaggtggtgggtctgctcggagacaacggcgccggcaagtcgacgaccgtcaacctcatctccggcattcacaagccgacggagggctatctcagcgtcgacggcaagaagacggcgttcacctgccggtcggattccgccgacgccggtatcgaaacgatctatcagcatacggcgctggtggattcgctctcgatcacccgcaacatcttcatgggccgcgaactcaccgaccgcttcggctttctcaggcagagcgaaatgcgcgagatcgccatggaggtgctgcagaacgcggtgcacatctccggcatcgacagccccgatacgcttgtcggcaatctctccggcggccagaagcaggccgtcgccatcgcccgcgccgtctatttcaagaagcgcgtcctgctcctcgacgagccgacatcggccctgtctgtgcgcgagacggaagctctcttgaaccaggtgctgaagctcaaggcggaaaacgtctccagcgtgctcgtcacccacaacatctaccacgcctatcaggtctgcgaccgcttcgtgatcatgagccatggcaccaaggtcttcgatgtcgacaaggcggacacgacgataaaccagctgaccgaatatgtcgtgctcacctgatcccacccaacagacggaaggggcatagcccgtgaccatgaaagtatcagtacgccaggtcgttggacccgaggatgccgcaaggcgcgacacgaaaggcctgcgcgacggcttcgtgatcgagcacctgtttcgccgaggggaggccaatctcacctacagccatctcgatcggatgatcgtcggcggcgtgatgccgggaagcgagcctctggagatcgccgccatcgccgagaccggcacggagcgctttctcgaccggcgcgaggccgccatcgtcaacatcggcggcgcggggacgatcagcatcgcgggcaagcgttacgaactcggcttccaggaagcgctctacgtcggcatgggcgagggtgccttgagcttcgcaagccgcgatccggcggaaccggcgctcttctacctcttgagcgcaccagcgcatcggacgtgtccgacggtgcacatcacccgcgagatggcgaaaaaggtggtcgttggctctgcggaagaatccaacgctcgcaccatcaatcaatatgtccaccccgatgtctgcgacagttgccagttgctggtgggattgacgatgttcgagccgggttcggtctggaacaccatgccggcgcatttgcacgatcgccgcatggaggtctatctctacttcggcatgcaggagcagacgcgcatctttcatttcatgggtgagcccagcgagacgcggcatgtggtactcaagaaccacgacgcggtgctgtcgcccggctggtcgatccattcgggtgccggaaccggccgctacgccttcatctgggcgatggccggcgataacatgagcttcacggacatggacaaggtgccgatggaagacttgcgatgagccttttcgatctcgccggccgctgggccatcgtcaccggtgccaataccggcatcggccaggccatcgcgatcggtctggcgcaggcgggtgccgacatcgtcggcgtcggccgctcggcgatggacgagacggcggatgcggtcacatcgacggggcgccggttcgtatcgctcaaggcggacctgtccgataccggggaggcgaaggccgttatcgaacgcgcccttgccgccggcgcctcgcccgatatcctcgtcaacaatgcaggcatcatccgccgcgccgacgcgctggaattcacggaagaggattgggacgcggtgctcgacaccaacctgaaatccgtcttcttcctttgccaggccttcgcgaaagcagcgcttgcacggcaggcgccggcgaagatcgtcaacatcgcctcgctgctctccttccagggcggtatccgcattccgtcctacacagcctcgaaaagcgggcttgccggcattacgagattgatggcgaacgagtgggcgtcgaagggcatcaacgtcaatgccatcgcccccggttatgtcgagaccaacaataccgaggcgcttcgcgccgatgccgaacgaagcgccgatatcttgaagcgcattccggccgcccgctgggcgaaggccgaggatatggtgggcactgcggtctatcttgcgtcgcgcgcttccgattatgttcatggcacagtgctgccggtcgatggcggctggcttgcccgataggagattatgatggcagatcactacacacttcccgacgacgtcacctggacggaggtcgcgcccggcaaccgccgcgccgtgctgtcccatcgccccgaggcgatgctcgtcgccttccgcttcgagcccggcgccatcggcgcgccgcattcgcatccgcacacacaggtaagctacgtcgccgagggcgctttcgacgtcaccgtcgacggcgtcaccacaaggctggatgccggctcgagcttcatcgtcgcccccaacctcgtccacggcgtcgtggctctcgagaagggcctgctgatcgacaccttcacgccgagacgggatgattttctataggaaggaccggagtaaataactatttagatacaaaataatacacaacaaaatcattatcatagatcgtttcttgccgacttgggaacgtccgtcgatcttgacaggataccgctttggctgtctgtcttgtcccgaggagagcggtgaggcctgatagttggaggcttcacgccgcaagcgaggaggacgcgtttctatgttgagatttgccgttgtcgggatcgaccatgggcataccttcgatcatgtgaagggattgctggccgccggcgccgaattcgtcggctattgcccgaagacatccgttcccgccattcgcgagatgttcgaaaagtcctatcccgatgcgccgcagatcgatcgggagcagttgctggccgatccctcgatcgacgtgatatgcatcgcggcgatcccggccgaccgcgccgatctcgccatccgcgccatgaaatccggcaaggacgtgatgaccgacaagcccggcgtgacgacatcggcgcagttgcaggcggtgaaggacacggtggccgagacgggccgcatcttttcgatctgcttttccgaacgccactgcgtgcgctccgccgtcaaggctggcaagctcgtccaatcgggcgccatcggcacggtcatccagacgctcggcatgggcccgcaccggctgcaactgccgacgcggcccgactggttcttcgaccctgagaaatttggcggcatcatcgtcgatatcgcctcgcaccaggtcgaccagttcctgttctacaccggctcgacatcggccaccgtcgccgcgagctctgtcggcaatttcggcatgcccgaccgaccggctttccaggatttcggcgaggtactgctgcgctcggacaagggttctggctacatccgcgtcgattggttcacgcccgaggcattgccgacatggggcgacggccggctgaccattctggggacagagggctatatcgagctgcgcaagtacatcgacatcagtgggcgccccggcaaggatcacctcttcctcgtcaacggcaaggagatgacccacatcgattgcagcgacgaaaagctcgactatttcgaggcgttcctggccgacgttcgcgaccgcacggagaccgcgatgccgcaggcgcatgtctacgaggtctgccgcctgtcgctcgaggcgcaggcgaacgctgtcaggatcggccaagggcaagctccggtcggggggcgctgagatgagcaggaaatttcgcgtcggcgtgatcggcgccggcatcgccgcgcgtcatctggcaggcttcgggtggaacaaggatttgttcgacgtcgtggttctgtgctcgctcgacgccgatcgcggcaaggcgctttgccaggagttcggcatcgctgaatacacgcaggatgccgaggcgatgatcgcccgcgccgacctcgatatcatcgacatctgcacgccgccgagctcccatttcgaactctgccgcagggcgatcgaggcgggcaagcatgtgatctgcgagaagccgctgttcggctcgatcgccgaggtggacgagatggttggcatcgtcgccaaggcgaacggcccgaagctgatgccgatcttccagtatcgctatggctccggtctccagaagctgaagatgctgatcgatctcgggctgaccggcgaggcgttcctgacgacgatcgagacccattggtggcgcggccccgattattacgcggtgccctggcgcggcaaatgggcgagcgaactcggcggcggcctgctcggccacgcgatccatgcccatgacatgctgaactacatccacggcccctgcgccgaactcttctccttcggcgccaccttggtcaatccgatcgaggtcgaggacacagcggcgctttcggtcaggatgaagaatggatcgctcgccagcctgtcgatgacactcggctcgcgcggggagatctcgcgcctgcgcttctgcttccgtgaccttgtggccgaaagtatcatcgagccttatacgatgggccgcgatccctggaccttcaaggcgggcaacgacgcgcaccaggataaggtcgatgcggcgctcgcccgctacgaggtcagggaggatggctatacccgccagttcgagctcttccatgaggcgctggtccgcaacgaggagccgccggtgacggttgccgacgcgcgcaattcgctggaagtggtcaccgccgcctaccactcgcaacgcaccggccttccgacatccctgccgatccttcccgaccacccgctctaccgctcctggctgccggaagacgcccgttagcaaggagagaagccgccaggaagtctaccgcacttatcctgcggggggacaaagaaagtcccaccgaagtaacgacttgctaagctccatttgtcagccttgatccattgattttcataatccgttgctcgaggtctttcatgtttttgagtaaagacgattggatcgcccagcgtgcctatgcgctgtgggaagcagaaggccggcccgacgggcgcggcggcgagcattggcagcaggcggaccgcgaatatcggatgctggaagagacgcgcgcctccgccgacggcagcgatctgatcgagcgcttgaaagcgatgggccggagcatgcgggcggcggaggatcgcgaggatcgaccggagacgccaggaaaggcaatgccttcgcgccgttccgccagatgatccgccccgccgcgcgggcgtcattccgcggtgttgcgcgttaagccggcgttaagcacgatcgcctgtttcccttatattttagtgggagaacgatccctagagtacaacgtcaacctttgctgaggaatatgcacagtcgaaggcatgattgccttcttgcaagtgcaggggcggcagatgttttttcgattgtagacgcggtcaggtcacggttcacgggacgtcaatccgatcgtcctcatccgcccgaaatcggcgccgacccgctttccatggatacatccgccgagcttgcccatctgaagaagctgttcgaccattcctcgcgtgccgcccgcatcggcgtgtgggagtgcaatctcgcggacgagaagctggcatggaccgacatggtctatgagttgttcgaccttcccatcggccatccgctcaatcgtgacgagaccgtcaagctctataccgagcgatcgcgcatcgagctcaccatgctccgcgatcgcgccatcagggagcgatccggcttcagcctcgacgccgagatcatcacggctaagggcaatcaccgctggatacgcatcaccgccaccgtcgaatgcgagggtgaccgcccggtccggatcttcggcatgaagcaggacatcaccgccgagaaaaagctcttcgacgagatccgctatctcgcggaattcgacctgttgaccagcctgccgaaccgggttcagttccaatccaccttcgacacgctttgcgcgaccgaggcgtcggggcagacagtcgcgctgttcctgatcgatctcgacggcttcaagcaggtcaacgaccggctcggtcaccaggccggtgaccaatgcctgcgcgtggcggccaattgcctgcgcgcggtgctcggcggggccgagctcgtggcgcgcatcggcggcgacgaattcgccgtgctccatcgctgcggatcgagcgatgaggcggcccggatcgccagctcgatcgtcacctcgctcgcggcatcctgcgacgacgatggccgccatatcggcatcggcggctcggtcggcgtggcgctcgccaccggctaccgtgcgccgaaggacatcttcgcggccgccgatggcgcgctatatgccgccaagagcggaggccgcaatcgcttcagtctcgcgcagccctccttcacgtctcaaatccacgccgcgtagggtacatgccgctcgcttgtggcttttcatgcggcgcgcttttgcgctaacagctcgatatcgacatgatccagcgagcaacaagacatgagccacattccgcagatcgattacgacaccgcctccgacgagatccgcgcggcccacgatgaggaagtcagggttcgcggccggatgaccaacatgaagcggacgctgctgcattcgccagccgcgcatcgcatctacgcggaatggttcacgctgcgcgccgagctcgtctcgatcggcgaccggccgatctgggtcttctcccatgcgatttcgaaggcctgtaactcgaagatcgccatcacctttttccgccgcgcgctgatcaacaacggctttgatccggacgcgctgcaactctccgaggaagaggcgctgctcgacgcgttcggcaaggcgatcgtggccgattccaacgccataccgagcgagatctgggtgcgactgaagcaacgctacgacgccaagatgctggtcgatctggttgccttcgccggtatcatgatcgcgaccgccgtcttcaacaatgtcgtcgaggtcgacttcgatccggagctggaagcgttcgccgagggcgccgctcagtagacagtcacggtttatcaagaaatatcaatgctatttgaggtctttctcgacttttatatcaagttcacccgcgacgaacaccgtgtgttcggtgatctgcggcaggcccatcagctcgccgaacgtgccgcgtgccagagggcctgagatcagcagcgtcggatctggtcggctgtcgccgtcaagcgcctcggacaattcgttgcaggcgatgccgaggccggtcgggtccagctgcaggtggccgaggtcgtgcagcttcttgagccatggctgactgttcagaatgccgccatgtgccgggccggtggtgacgaccaccgcatcataggcccgttccagcaggacgccgttgcgcaaccgaagcacgacactgatgtcttcgtcctggcgcctgatcgcggagacggaagcggccagcacttccatgcggccgcttgccaccgcccggtccagcacctcttccacctgcggcgcgatccggaagcggtgcacgtcccagaaagggcgaaggtggcggacgatccggcggcgttccggcacgggcaaggcccgccagatcgcgtgcccatgaccgcgcaactgatccagcaccgcatgccaggtcaggcccgactgctcggcgtcgcggatggtctggcgaacgaggcgcaagagctgcgtggcgctgtgaacaggcgcggcctcgaactccccgaaaggctcctgctggacctgggcatgtcctctcgacctcaggccccgtctcgagatcgacgttaccgcgccgcggtgccccacgctctcgagcgacgccacgacatcggcggccgtcagcccgttgccgacgacaagcaggcgggcatccggttgaatggcgtcgagcgcgcccggctccgtcgcatcggccacgaacctcgggtagccggcaagcgccagcagggccgatggcgtggacggcgaggggtggctggtcgcgatgacaagataatcggcaaaggtctggccgccctggctgtccgcaatccgccagaaggcgccatcgcgctcgacatcggtgaccagcgcgcgccggtgcctgaccgcgcccgtctcgacgagcggccgcagcgctgacgcaacgtatcggccaaacagctgacggcgcggaaagatcgcaccgtccgcgcggcacgcggcgggatcgtcggcgatcgcgtcgttgagctcgatccattcgaggaaatcgccctgatgctccggcaggaggctcatgcgggccgccggcacgttgatgcggtgggcggggtcgtccgtgtcataggcgaggccgcggccaagctcggcgcgcggctcgaaaacggtgatggcgggcggatgctcccggccctgaagcgccagatgataggccacgcccgcgcccgaaatgccgccgccgatgatcgccaccagcggtcgccgacgagcgccgctcggtccggcctgcgaagaggccgaaaaaaaggccgaggaagggaaggtgtcgtcattcacgatcagcggtccatttcggtctgtctctcggcattggtaatctaggtctcggtcggccgtctggcaacgccggccaatccttgctccaagatagagtaaccgaccgccgccaagcggggatggcgctagcctagctcttccccttccatggcacgagcacggcttccagcatgcggatagcggcgctgaaggagaaggcgcaggcggcgatgatgccgatgccgacgaagacgacgtcggtcgccaggaactgcgacgccgacatgatcatgtagccgatgccgcgggtcgaggcgatcagctccgctgccaccagcgtgccccagccgatgccgagcgcgatccgcagacccgtcaggatctccggcagcgccgagggaagcacgatgctgaccaggatctgccacggccgggcgccgagcgagcgtgcggcgttgacgcgttcgatcggcagcgagcgcacgccggcctgcgccgaaaggcagatcggcgcgaacatggcgagcacaaggagcgtcaccttggaggtctcgccgatgccgagccagatgatcatcagcggcagataggcaagcggcggcagcggccagtagaactcgatgggcgtatcgagcacgcccttgatccagcggttcaaccccatcagcaagcccaggggaatgccgacgacggtagcgatggcggcggcggtgacgatacgaaacaggctcgccgagacatgctcgtagagcgaggcgccggcatagccgtcattgtagatcgcgcctacctgtgtccagacctcctgcggcgtcggcaggaagagacgcggcaccagcgccagctttgcgaccagccaccaggcagccagaagcaccagcgcggttgcgatgctgatcagcacggttggcttttcgcccgcgccgaagcccttcatcttcacgagtttcggctgttccgcgggtgaaccaatgacgacgcggccggtttcggtgaaatcgctcattcggctgcactcctcagttcttccgacccatgcaggatgtcgcggatttcctcgcgcaggctggcgaattcaggcgatgtctttaccgcccgggcatcccccgtttcagcgaagcggcggacgaaatcgaggtcgaagcgggcgacgatgcggcccgggcgcggcgacatcaccacgacctgcgtgcccagaaacagtgcttcctcgatcgagtgggtgatgaagaagatgcgggtatgcgtcgccttccagatcgacaccaagagctcctgcatctgttcgcgggtcaggctgtcgagcgcgccgaagggctcgtccatcaggagcacgtcgggttcggtcgccagcgctctggcgatgccgacgcgctggcgcatgccgcccgagagttcataggggaaggccgcggtaaaatccttgaggccgacgagatgaagcaggcgttcggcccgttcgcggcgggcgactttcggcacgccggcgaatttgaggccgagggcgacattgtcgatcaccgtcttccagggcagcagcgtatccttctggaagacaacgccgcgatccgcgcccggggaggtgacgggccgtccgtcgagcgtgatcgctccatcggacagcggcaggaagccggcgatggcgttgagcagcgtggacttgccgcagcccgaggcgccgagcgcgaccacgaagctgttttcgggaatggcgagcgagacgcggtcgagcgcatgaaccgtccggccgtctcgtgtctggaaatagacgctcgcgtgatcgactttgagcatgtcaggtctcttcgaaaatgaggacgccggcgcggtgccgcgccagcgtatccgccgaaatcggcttagttgctcggattggtcaaagcatcagctgtcacaaatgcggcgtagctcggcagcacttcgctgaccttgccctgttccttcaggaaagtggcggtatccttgaggatcttggcagcacccgccttctcgccgccgccgagccacgcgtcggatgcctggacgtcgggcgtcagaagcgtcaggttcttcagcgctgccgcctgctgttcgggcgtgccgccgagcgccttggcgagcagcttggcgttttcgctatcggcttcccaggccttcttgtcgttggcgaaggaggcgtagtaggtgttgatgacgccggcgaagctcttcaggaattcagggttttcatcggcgaatttcgaggccgcgacccaggcggagaaggtcggcgcgcccttgtcggcgacatccttggaggtgaccagcaccttgcccttcttcttcagttcgctcagcgccggatcccagacgaagccgccatcgatatcgccgcgattgtagctggcgacgatctcgggctgcggaatggcgaagacctgcacgtccttctcgctgaggccgagcgacttgatcagcgccaggagctgatagtggtcggtggaaacgggggctgcggcgagcttcttgcccttcaggtcgttgagcgagttgatgcccgaaccatcgcgcacgaccagcgcctcgtcgatgcccgagatcgaggagaggtagaaggccttgacggcaaggccgcgcgaggtggccgccgcgaacgggctggagccgacgtagccgacctgcacgtcgcccgaggcgatggccgcgaagatctcggcgccggaattgaatttgcggaagtcgatgtcgtagcccgtcgccttggcgaactcgccattggcaatggcaaccgacgacggcagtgcgtccgtctgataggcaacgacgaccttcttgtcggctgcctgcgcgaggaacggcgcggctaccgccgccacgccaagtgtaagtcctgcgataatgcccttgatattcatgtttcgcccccagatgccgcgcttgtgcgccggctcaacttgtttcgacgggaaaacactaaggcgggccatggttggcacacagataaaactatctattttatagagtatagcgacaatattgttttgcgcctgatttgcccggtggacaattgcggcttgtcggtcgttgccgcgtcaggcggcatccatggtgatgaggtagcagagcgcctggccatccatctcgagcgaaatgcctgtcgcatcctgcagcagcaacgtgtcgccttcaccaagcgagacctcttcatccggccaggtgagattgaccgcgccgcgatggcagaacaccagcagcgtgccggatgcgccgccgaatgtgacttcaccatcgacgacgatgcgttcgacccggtgccacagaccaccgcgacgcgtcatgacgttgagatccgtgatcggcccggatttcagcgtcgccgacaccgtgacgtcggcggggaaggcgaggggcgcgctctcctgcgtcaacagcacaggagcacgaccgtcgatcgcaagcgacatgccttcgccgtcgaggatcgacaaggttctgtcgatgccggggaagatcgagaacggcccatcggtcgcgaccgtcgccatgctgatgcgccaatcgaactccgaatgtgcggccccctccggcgaaaccgcaatctccaccgtctccccgccaccgttcttccacggcatgcggcgatagctgttggcggtgaggattgtggcgcggggcatgggatctccggaggttgcaaatgggaggggagtggaggacactcagggcactggaggcgagtgatggacatcgtcaacatggcaaaggacgccccgatcgttcaaccggacacggcgccgaagaagcgccgcattggtttcatggaggacatgatcaacgttcccgacgacttcgacacgatgatggtcgaggaaatcgaagacatgttctatggcggcgacctctttcccgccgaagacccaatcaagccgatcctaacagacaaggaatgagcggggacgttcgagaggacgctgattgccgcctccagtatccgggcctcataccattctgaggcccggtgtctcgctctatcaattcccgagaatccccggcagccgcaggcccttttccttggcgcagtccagcgcgatgtcgtagccggcgtcggcgtggcgcatgacgccggtcgccgggtcgttccagagcacgcgttccaggcgcttggccgcatcgtcggagccatcggcgcagataaccacgcccgaatgctggctgaagcccatgccgacgccgccgccgtgatgcagcgagacccaggtggcgcccgatgcggtgttgaggagcgcattgaggagcggccagtcggacacggcgtccgatccgtccttcatcgcttccgtctcgcggttcggcgaggcgaccgagccggagtccagatggtcgcggccgatgacgacgggagccgagagctcgccgttcttgaccatctcgttgaaggccagcgccagacggtgacgatcgccgaggccgacccagcagatacgggccggcaggccctggaaggcgatgcgttcacgcgccatgtcgagccagttgtgcaggtgcttgttgtcggggagcagctccttcaccttggcgtcggtcttgtagatatcctcgggatcgcccgaaagcgctgcccagcggaacgggccgatgccgcggcaaaacagcgggcggatataggccggcacgaagccggggaaggcgaaggcgttttccaggccttcgtccttggcgacctgacggatgttgttgccgtagtcgagcgtcggcacgccggcatcccagaaggcgaccatggcttcgacatgctttttcatcgaggcgcgggcggcggcctctacggccttcggatcgctctcgcgcttggccttgtgctcgtcgacggtccagccgatcggcagatagccgttgagcgggtcgtgggcggaggtctggtcggtgacgatatcggggcgtgggccgccggccttcatacgcttgacgagctcggggaagatctcggcggcgttgccgagcaggccgacggacttggcttcgcccaccttggtccatttgtcgatcagggcgagcgcttcatcgagcgtcttcgccttctcatcgacatagcgggtgcgcaggcgaaaatcgatgcgggtctcgtcgctctcgaccgcgaggcagcaggcgccggccatgacggccgccagcggctgcgcgccgcccatgccaccgaggccaccggtcaggatccacttgcccttgaggtcgccgttgtaatgctggcggccggcttcgacgaaggtctcgtaggtgccctgcacgatgccctgcgtgccgatatagatccacgagccggcggtcatctggccgtacatggcgagacccttcttatccagctcgttgaaatggtcccaggtcgcccagtgcggcacgaggttggaattggcgatcaggacgcgcggcgcgtccttgtgggtgcggaatacgccgaccggcttgccggattggaccagcagcgtttcttcttccgtcagcgtcttcagtgtcgcgacgatctggtcgaaatccgaccaggtgcgggcggcacggccgatgccgccatagaccaccagctcatgcgggttttccgccacctcggggtcgagattgttcatcagcatgcgcagcggcgcttcggtcatccagctctttgcattgagctcggggccacgagggcttctgacatcgcgaatgttgtggcgtggattgctggtcattgcggttccccttatccgggttggatggcttgttgtttcaggcttatttcttcaggctcggcgcgatcgcggcgatgcgctcgaggatgtctttcagatggacgcgcaggcgctcggccttggcggtgtcataggcgaagggcggcttttcggtctgaagatgcgtggactgcgccagctccatctggatcgcatgcacgccggtttccggccggccgtaatgccgcgtcgtccagccgcccttgaagcggccgttgaggatgctgtcgtagccggtggccgaggccgtcgcggcgacgaccgcctgctcgatcctgctgtcacaggtcttgcccatgtcggtgccgatattgaagtccggcagcttgccttcgaagaggaaggggatgtgcgagcggatcgagtggcaatcgtagaggatcgcgacgccgtggatcgccgtcacccgctcgatctcggcggcaagcgccgcatgatagggcgcgtggaaatcgcgcagccgctctgcgatatcggcctcgtcgggcgtctcgccgtccttccagatcgacaggccgtcgaaatccgtctcaggcaccaggccggtggtgttctggccggggtagaggctggtgccggatggatcgcggttggcgtcgatcacgtagcggtgaaaggtggcgcggactgtagtcacgccatcaaggagggcgtcatagagattgtggatgtgccagtcggtgtcggcgagcagcttgccgttgtcgttcaggcgatcccatatggcaggcggcacgtcggtgccggtgtgggggaagccgaggatgacgggcgatgtgccctggcgggtttcgtgagtggtcattggttgaatgctccacgggttgcgggtgggttacccccctctgtcctgccggacatctcccccacaaggggggagatcgacccgttgttatcgccttgcagaacggttgactttggagcgagcgggtaagcccagccaatctccccacctgtgggggagatgcccggcagggcagaggggggcgccacgagcgtagacatcaccatcacgcctccagcaccggcagaatgcccgaagacaccgccgcattgagcccacccgatgccaccagatcgctggccgcctgcaggtcacccgccatgtagcggtcgacctccagcgtcgccaccactgaacggatcgcggcgatagcgcttgaaagttccgggctggtggcaagcggggcgcggaattcgacgccctgggccgccgtcagcgcctcgatgccgatgatcgagaacaggttgtctgtcatctgcagcaggcggcgggcgccgtggcaggccatggagacgtggtcttcctggttggccgaagtcggggtgctgtccaccgaagccgggtgcgacatctgcttgttctccgacatcagcgccgccgacgtcacttccgcgatcatcaggccggagttgaggccgggcttcttggcgaggaaggcgggcaggccgtaggagagggccggatcgacgagcagcgcgatgcgccgttgggcgatggcgccgatttcgcagacggcgatggcgatctggtcggcggcgaaggcgaccggctcggcgtggaaattgccgccggagacgacggaattatcggagaggaccagcgggttgtcggtcaccgcgttggcctcgatctccagtgtgcgggcgaccgaacgcaacaggtccaagcaggcgccgtcgacctgcggctggcagcggatgcagtaggggtcctggacgcgctcgtcgccctcgatgtggctctggcggatgaccgagttgtcgagcagtgcccgcagagcagccgccgtatcgatctggcccttgtggccacgcagcgtgtggatgtcgggatggaacggggcggacgagcccatggcggcatcggtcgacatcgcgccggtgatcaaggcggcctgtgcggcgcggtgggcgcggaagaggccggccagcgccagcgcggtggaggtctgcgtgccgttgatcagcgccaggccttccttggcggccaacaccacaggtgtcaggccggccttgtcgagtgccgcggcgccggagagccgctcgcccttatagaaggcttcggcttcgcccatcatcacggcggccatatgcgccagcggcgcaagatcgccggaggcgccgacggagcccttttccgggataacagggatgacgcccttttccagcatgccctcgatcagccgcaccagctccagccgcacgccggatgcgccgcgaccgagcgagacgagcttgagggccatgatcaggcggacgatgttttcggcaagcggcgcgccgacgccgcagcaatgcgacaggatgagattccgctggagcgtcgcgacgtcggcgctgtcgatcttgatcgaggcaagctttccgaagccggtattgataccgtagacaggcgcgttgccggcggcgatctcggcgatgcgggcggccgccttgttgatgccggcgtcgaaggagcggtcgagcacagcaggctcgccggtccagtagatcgtttccagatgcttgagcgatacggagccggggtgaagagtgatggtcaacggtcgatcctttcgcccttgaagacgtgtgcgtgaagcgggttgaagccgatgcggtagacgagttcggcgaggctctcgacatcccagatggcgaaatcggcggacttgccggtttcgagcgtgccggtttcgtcgatgaggccaagggcgcgtgcaccttcgcgggtggcgccggcgatgcactcctcgacggtgaggccgaacagggtggcggacatgttcatggtcaaaagcagcgaggtcagcggcgaggtgccggggttgcaatcggtggcgatggcgatgtgggcgccggcctcgcgcagcgccttgaccggcggcttctgcttttcgttgatggcgtagaaggcgccgggcaggagcacggcgacggttccggccgcggccatgacgacggcgtcatcggcggtgagatattcgagatggtcggccgaaagcgccagataggaggccgcgaagcgggccccgccgaggttggagagctgctcggcatggagcttgaccgggagacccagctgctgggcgcggtcgaagacgcggcgcatctcttcgaccgaaaacgcgatgccctcgcagaagccgtcgacggcatcgaccagaccttcggcatgcgcctgctcgaggccgggcagcacgacatcggtgatgtaatcgccattgcggcccttgtattcgactggcgtcgcatgggcgccgagataggaggtgacgacgcggaccgggcgaagattgccgagagcgcgggcggcgcgcagcatcttcagctcggcttcgatgttgagcccatagccggacttgatctcgatcgtcgtcatcccctcggcaagcagcgtgtcgagacgcggaagcgatgcggcgacgaggccgtcgacggacagcgcgttggtggccttgaccgacgagacgataccgccgccagcgcgggcgacctcttcataggtggcgccatccagccgcatctcgaactcgcgggcgcggttgccgccatggacgatgtgggtgtggcaatcgacgagacccggcgtcacccagcggccttcgagatcggtgatctcggcgcgctcgatcgccaggaccggcaattcgctttccgggccgacataggtgatgcggccggattcgacgacgatcgcgcccttctcgacaacacccaggccttgcttggccggatcgagcgttgccaggcgggcgttgcgccacaggtgcggccgagcctctcccgaggtctgcctgtctggaaaattgttcccgttcatcagctttgcgcctttccttatgcctcaacatgtatatacataataaacaggtgacaaggaaaaatttgggcgtatctctggaaaagaaagagatgcttccgcagaaggagagaaaacggtcatggctcaaacagttgcgacgacactccacgcgcgcgccgctcttctgccggagggatggcgggagaatgtccggctgacgctcgacggtggacgcatatctagcatcgagacatcggttgatgcggagcctgccgacgaacgccatcatacgctcgtcccggccatggggaatctccacagccatgcttttcaacgcgccatggcgggcttggccgaggtaaggggccacgccaacgacagcttctggagctggcgcaccgtcatgtacaagttcgccttgtcgatgacgcctgatcatgtcgaggctgtcgcctcgcagctctacatggagatgctggaggccggcttttcccgcgtcggcgagtttcattatctgcaccatgacaaggacggacggccttacgccaacatcgcggagctggccgaacggattggcgcggcgagtgcgacggcgggcatcggactgaccctgctgccggtcttctacgcccattccggcttcggcggtgccgagccgatcgagggccagcgccggttcatcaattcgctcgacagcttcgcggcgttgatggacggctgccggaaactgacatcgcggctgagcggcgccgaactcgggcttgcgccgcacagcctgcgggcggcgacgccggaagagctcaccaaggtggtgccgatggcgggcgaggggcctatccacatccacatcgccgaacaggtgaaggaggtcgaggattgcatttcatggtccggcgcccggccggtcgaatggctgctcgacaatgccgatgtcgacaaccgctggtgcctgatccacgccacccacatgaccgacagcgagacccgcgagatggcgcggcgcggcgcgatcgccggcctctgcccgatcaccgaagccaatctcggcgatggcaccttcccggcgccgctgtttctcgaagagggcgggcggtacggcgtcggctccgattccaacgtgctgatctctctccccggcgagctcaggcagctcgaatattcgcagcgcctggcgctgaaagcccgcaacgtcattgccgcatccggcggttccacggcgcgcagcctcttcgaccatgcgatcacgggcggcggtgcggcgctgaaggcgccgggcgggctggcgatagggcaccacgccgatatcgtagccctggacacgtcggccgtcccctatctcgccggcgatcagctgctcgaccactggatgtttgctggcggcgtcggggtcgacagcgtctgggcgctgggtgagaagaaggtcgaaggcggccggcatgttggccgcgaggcgatcaatcggcgcttcctcaaggcaatgagcgaattgctggcggcctgacggccttccccgactcggacattgccgatagaccgggaagaaaagcggagcgtgacgatggatcagggcagggacatcaccttgcatcagcggatcgtgaacgacatcgaaggccgcatcgtctcgggcgagtggccgccgggtcaccgcattccgttcgagctggagctcaccaaagcctatgactgctcgcgcatgacggtgaacaaggcgctgacccagctcgccaaggccggcctgatcgaacgccgcaagaaatccggcagcttcgtcacccagccgcaggcgcaatcggccgtgctggagatccacgacatcgccgccgaggtgaaatcgctgaaccttgcctattcgttttcggtcgccaggcgcgccaagcgcaaggcggacgccgacgataacaggcgcctcgaattgcagccgggctcctccgtcgtcgaggtggtctgcatccaccatgccggtggacgtcccttctgtctcgaggagcgcctgatcagcctcgccacggtgcccgaggccgaggatgccgacttcgcgaacctgccgcccggcgcctggctgatcaaccagatcccatggtcgagcgccgaacaccgcatccacgcggttgcggcgggaggcgaagcggcgacgttgctcgacatcgcgcgcaataccgcctgcctcgtggtcgagcgccgtacctggagcaatgtcggcccggttacccatgtgcggtttacctatcccggcgacaaacatgcgctggtggcgcggtttacgccggcgtcttgagggggatggttgacggtgtggagtcgccaacccggttgtggtgccgcttggtatccggctggcctgccggtcattgatgtgagcgcgtagggcaaagacccctcccaaccctccccacaagggggagggcttaacttgtggcgatgttgacgccaagaccgtgagcgggccacgagtcctctcccccacctgtggggggagatgcccggcagggcagaggggggtgttccacgacgagacctctctatcatcgcaccacatccccacagacacaccaaaaccccacgccgcccgaaagcccgtgtctccaccatgcaatcttcactcggacggggcgctggaaatcacctcgattgagtaagtaaaatatggcgctttccagcgccccgttcggcggtttatgcccgcgactccgatctctctgccttctcgcccaacttcgccgggggagaccatgtgtgcctcacaggcacgtccgggctcaactcggcaccctcttgcaagggataccgccgtcaccggagggagatcattttccgcggacccggaccgtgaggttttgcgtctcaccctcacgctccgcgccgatcccgcctcgccggcacgcctgccggggtatccgatgacgggacgcctttattgtaggccgaggtctttcgagcggggaaaattgaaacaagaaattcgcgcaaactattgatttgatgaaatcgcgtcgtcctcagacacaagaaagccgcgcatctttcgacgcgcggctccaacatcctgggggctgataagcttagagcagaccggcggcggtcatcagttcgacgaccttcttgttgtcgagcttggaggcttcgaccttcggggcctggagatcggcgatcggaaccagcttggcgttggaatcaccggcaaccgaatactcgaacgaggtgccgttcttcaggatgtcctggccagccttggaggtgatccacttgaggaacgcctgggcttccttcgacttcttgctggacttcagcacaccaccgccggagacgctgacgaaggcgcccggatcctggttcttgaagtagtacagggcgacgttcttgctgttctcggcggtcttggcctgatcgccgaaccagtagtagtggtagatgacagcgccttcgacttcgccggcattgacggccttcatggcaacgctgttgcccttatagggcgttgcgttttccttcatggacttcagccatgccgcggtcgcttcctcgcccttcagctgcagcatcgcgccgacgatcgcctggaaatcggcgccaccgggagatgcaccccaacgacccttccaggccggatcggcgagatcgaggatcgacttcggcagcttgtcttcggtgagcttgttcttgtcgtaggcgaacacggtcgagcgcgcgccgatgcccgtccaggtgccgtcggccgggcggaactgttctggaacctgggccagcgtttccttgtcgacctgtgcgaagaggccggcggagccgaccagtgccatggccggggaattttcggtcaggaatacgtcggcgggcgatgcgtcgccttcctggatgatctggttggcgagctgcatgtcgccgccattgcggacggtgaccttgatgccggtatccttggtgaaggcttccgtccactccttgccgaggccctcgtgctgggcgttgtacaggacgatgccttcggcatcctgcgcgaacgcaccgtttacgaaggctgttgcggcgagaagcgcggcggcggaggccagcttcaggctgatggatgtcttcatgtcaaactcccgattggagcgaaaccaagcacgaatcggctcagattttcggtcgctatgaattggttagcactgcgtctgaattgttcggccagccgtgccggctaaaactattccaacacactccacttatcttgagccgttggtcctgaccatggggactaaagtccctatcggcggccgtagaggaccggggccgctatgaatgagcgtcggatgcgcgagaattgacgaacccgaccggcaatatctcacacgatcacaaccgttccggccggaaaaccaaggagcatacgcatgaagaagatcgctgttcacacttgcgttgccgtcggatcgctgcttctggcgttcggttcggccggcgccggaccactctccaccgacgccggcctcacggcggccaagcctccgctcgtcacgctcgtacgccagggcgccgacgaccgcgtcaatcgcaagctcaagcgccacggccagggtctcgacgacggtcccaacgacgttcgccacagctcgtcctcgtcgtcatcctcctcttcgcgcgggcgcggctcggatgattccgcaagccatcagcgcaatggcggagacgaccgcggtggcgacaatcgtggcggccgtggcggcggggacgacaacggcggcgacaatcgtggtggccgcggcggcggcgacgacaacggcggacgccactaaccgtcagatcagccatggcccggcccgttcgcggaccgggccaacccgtcaaggagatcgatcgtgaacaagaaaatcgcctgcgccttcattctctgcacgatgttcgccgtttcagcgccggtctcggcatgggcggagaagggaggcggcgatggcggctcaagcggaagcgggagctcgggcggaagcggctcggggtccggctcaggttcgtccggttccgatcattccggctcctccggctcgggtcattccggctcgtccggttcttccgaaacgtcaggttcgggcacgtcgggttcggggacgtcaggatcatccggctcgcgctcgtcggacgacagtggcggcagccggtccggtggcgatcggcatgggcgcggagacgagcgcacgggttccatatcccggagcgaagatcgcgcctttgatggcggctggcgcgagcgcatccggaacggccgttatgagctgttcgacccggaggggcgcctcgtcatccggcgtgccgcaaagagcagcgatgtcgagcggtttcgctgacgcgacgcgaacggggttcagggtcgcgaccgcgcgtcacgcaggaagatcgcggcttcggtgcggttgcgcgccttcagtttctgcaggatgcgcgtcatgttgtgcttgatcgtcttttcctgaaggttcagctggcgggcaacttccttgttgctgttgccgtcggcgaccagaccgagaatctgttcctcgcgcggcgtcagcaaggccagcgcgtcgtcgtgcggattgcgcggggcggcgggctgtggcagggcggtctcgcccttcatctccgtcaggatgcgcgcggcgaggctcggcgacacatagctctcgccggccaccacattgtggatcgccgataccagcgtcgaggcgttgacccccttcaggatataacccttcgccccttccttcagcgcgtcgaaaagatcgctgtcttcctccgaggcggtcagcacgatcaccgttgcggccgggtcggtctcgacgatcgaccgcaacgcctgatgcccgccgcccggcatggagaggtcgaggagcagcgcatcgggccggtgctcgttgaacagtgcaaccgcgtcggcggcgctggcgccttcgccgaccacttcgaagcccggttcgtcggaaaggctgcgggccaggccgttgcggaagatcgggtggtcgtcgacgatcgcgaccctcagcatattcgacgtcattccgttggtctcctcggcaatatcatcctcaaggcggttccggcgctggcatccgacgtgatgtcgaggcgaccgccgagcccggccaaacgttcctcgataccggcaagaccgagcccgtcctcgttgccggcccgtacgaaaccggttccgttgtcctcgaccgcgatcacgatctgctggtcgtcttgggtcgccgtcaccgagattctcgatgcgccggcatgccgggtggcgttgctcagcgcttcctggatgaagcggtagatacagatcttcgcggcctgcgcggtgacgtcgagcgagccgacgtccgatatgatcctgctgcgcgaatgtgtctcgtgtgcctgaatggcgcggcgaacgacgtcgtcgcccgaaagcctctcgagttccggcagcgtcaggccgcggcagatgttgcggatttcctggatggcctcggtgatcgagctgctgaccagcgattcgtcgtcgcccttcgcggttcccttcgcgattgcttccagcctcagcgcggcaaagccgagcagctgcgcggggccgtcgtgcagctcggccgagatgcggcgcaggtagcgttcgttgagcgtcgccgtgcgctggttcgccttgtcggcgcgctggcgcagagttcggttgaggtcgagcatccgcgacagctccaaaacctgcgcatcgagcgaccggcgttgggcgtcgatcaggtggctgcccctggcaacgatgatgaagagcagcgcgagcatacccgcggtcaccgtgccgacgacgagccagctttgcagcctggtgaccgcaagttcggcgcgcaggtcgctggcgacctcgtagaactccgcgacaccgatgatgtcgcccgaccagggctcgcggatcgggctgtagatttccagaagcggctggtcgctctgctgctccagcttgttttcctcgccctcgagatcgtcgaactcggcatggacggtgccggcgagcgccgtcgcaaggccctcggtcatcgagaaatgcttgccgacgaggctggattcgctgctgaacagcacggtggcgtcgggacgccagatcttgaacgagtagaggcggccgcgcagcacgccctgttgcagcgtttcggtcaacgcccgcttggcgccctcgccaagcgacgtgcccgaggcgagctcctgcgtgagcggcgcgatgatgctgtcgacatagagcgcggtggcgctgccggtgttgcgcaccgtcgcactttcgatgcggctggtcacccacaatccgatcagcaccatgccgagtacgagcaccagcccgcccgcaatgccgaactgccacgccaggcttagcctttggcgcagcatcctgcgaggtggggtgaccgaaacgacattcatcgcgctagcatatcgatgtttgcagccaagaagaagaaggaccaatggcggccccgcagggacgaaaggcgacgcagcgggaggcgtgcattcggaatttccatgggcgggatcgacgtcttgagaattggttaatgttctggcggtagggtgactagagttaacgaagccttactcggtagaagatgattcggcgcattctcattgttctgatgatcatgttgacgacgatcggcagtgcgcagacatgccttccgagcgcttccttcgccgcgcctgctcaaaccgagatcctcatggagcccgatgtcctgtcccacgcggccgaccgcgacatcggacatgcgcatgacggcgatcactggacccggcggcagccgggagaggcttggcccagcgcctggaaacttgtcgacgtaagctattatcccgacctgccgatctacctcgagggccggatgcgcgcgcccatctatcgaccgccaatcgccggcggcccgctttctcatcccgatccactagccagagcagcctgacgatcacctgatgatatcagggctgctcgagagagagcccagatgttttcagtagccgacgcacacaagagcctgcccgcctcgccgcgatatgcccagacgatgggagcgcgctgacgatgagcctcgtatcgaaaatcgttctcgcgaagcgccgcggccatctcaatgtctcggcacttcgggtgaagaacaggaaaaaggtcgatctctacaagcagggcaagacgcgcgtcgtgcttgtggcggtagggcttgtcatcgccttcgcggccagcgcggcgcggctcgtcgaatacggggtccgcgatcccgcggccgcatccgacattctgccttcggacaagctcatggcgtcgcggccagacattctcgatcggaacggacagttgctcgcgaccgacatccggacggtctcgatgttcgccgaacccaacaggatcgtcgacgtggacgacgccgtggaaaaactcgcgacgatcttcccggatatcgatcgcaaggggacctatgcgaagctctcggtgaaatcgtcgagattcgcctggattcgtcgccagatcacgcctcgtcagcaaagccagattctcgagctcgggattccgggggtcgggttccgccccgagaagaagcgtttctatccgggcggcaatacggccgcgcacgtgctcggttatgtcgatatcgacaatcgcggcgtcgcgggaatggagcgatacctcgacgagcaggggttgctcgaccttcgcgccgccggactgacgagcgacatgcctctggagccggtaacgctgtccatcgacctgcgcgtccagaacatcgtgcgtgaggtcgccgcggaggccttggtcaagtacgaggcgcaggcggccggagccgtcgtcctcgacgtcgaaaccggcgaggtcctggcgatggcatcgttgcccgacttcgatcccaaccagccgtcccgcacgctgcccgacggcaaggtcgacaaggaatacgagaagggctggttcaaccgcatcagcaacgcgacattcgagatgggctcgaccttcaagagtttcacgctcgcgatgggcctggacgaaggcaaggtcacgctgaactcggttatcgacgcttcccggccaatccgcatgggcggcttcaccatcaaggatttcaagggcaagaaccgcccgctgaccatccccgagatcttccagtattcgtccaatatcggcacggcgggggtcgccgacctggtcggcatcgagcggcaccaggagttcctgaccaggctgggactgctctccaagatggagaccgagatgcccggcgtggcgacgccgacgcagccgaaggtctggaagaagatcaactcggtcacgatctcctatggccacggggccgcgacgacgccgctccagacagccgttgccgccgcctccctcatcaatggcggcaggcttgtcccgccgacatttcttccgcgcagcgccgcgcaggcaaacgatatcgccaagatcgtcatccgcgagaagacgagcgaggacatgcgctatctctatgcgtggaacggcatcaagggatcgggccgcagcgcccaggtggaaggcttcaacatcggcggcaagacgggaacggccgacaaggtcatcaacggccgatatgccaccgaccagaacttcaacgcgttcgtcgccgcattcccgatggaccggcccaaatacatcgtgctgaccatcatcgacgcgccgcaaaccggcgagaatggcggtcgcacggcggcgtctaccgccgcaccgatgatcaagtccatcatcgggcgtgcggcaccgctgttgggggtcgccccgcgcttcggagacccgggtgcggagtatctgctggcgaattactgatcagcgcgggggaaggcccgcgccgaaggccaggcgtcagagcttgacggcctggccggtgcgcacgctttcgtcggccgcgaggcagatcttcagcgatgtgacggcgtcgtccatatggcgggcgaggtcgagatcttccgttatggcgcgatagacgaaatcctgctcgcggtcgcacagcatctggtggtcgggctcgtcgtgcatgtcgagccagtcgtcggatcggctgaagccgcccttagcatcggttcccgcgtggtgcacgcgaaggcgcgacgtcttggtgtgggcgtcgaggctggcggaactcgcgccttcgtccatgacgatcgagaccgagccgttgggcgagatcacgtctttgacgaagaaggccgtttccgacatcatcggaccccagcccgcctcgtaccagccgacgctgccatcctcgaacagcacctggaagtgaccgtaattgtacatgcccttgggcaggccctgcgccagcccgacgcccatgccgcgcacctcgaccggcttggaatcggtgatctggcacatgacgtcgacataatgcacgccgcaatcgacgatcggcgaggtcgtctgcatgatggaacggtgaatgtcccaggcggctccgctcgattgctgattgaggttcatgcggaacacgtaggggccgccgaggctgcgcgattcggcgatcatgcgcatccacgagggatgatgacgcaggatgtagccgatgacgagcttgcggccattggccttggccgccgctacgacccgctccgcatccgcgacattggccgccagcggcttttcgacgaaaacgtgggcgccgctttccatcgccgcgaccgccatgtcggcatgggtgttcgtatgcgtggcgacggagacgacatcgggcgagaattcggcgagcgctgcggcatagtcgttacgcaccggatagccggagagctctgccggcagcgtcggggtcgagcggttgacgaggccgacgatctcgaagccgggatgcgcgtggtacgcgagcgcgtggctcttgcccatctggccgagcccgaccacgaggaccttgagttctggatttgtcatgagattcgcctcgtttatcaggccgccgtccggcgcgccccggcaatcgcgcgggcgccgatgctggcaagggcgaccgagaacagggtgggattggtcgctgttgcggtcgggatgacgccgttgccggcgacgtagagattatcgaagccccagaccttcgacgtcttgtcgcagacgctggtgccatcgtcggcctcgcccatgcggatcgtgccctggaagtggagagaagagcccaccggctgcacgaaggtggcgaagcccgctgctggccggccgatgatgttggaaatcgccagcgcgtggtccttggcctcttcgaggcgcgccttgtcgccttccgactggcgccacttgatcgagatggcgggcagtccgagccagtcggtgcgcgtatcgtcgaaggtgacgcggttgtcggggctgatgtcggaagagacgaagaagcccatgccgatcggctgcccgacgatgtcgcccgaacgcggcatgctgtgcaggctggcaggcgcgatggtcaccgaataggggaagtccctggtggcgggaatccagctcatcgccttcatcggcacatcggtatccatctcggagatctgcgagacgatgtagtgatcgttgaggttgcggccgagggcctcggggcggatgccggatgcgtggagaagctgtggcgaatggagcgcatcacaggcgacgacgactgtgccggcgctgaccacgaagctgtcgccggagcccgtgctggcgagctcgacgccggtgacggtccggccgtcgtgaatgacgcggcggcaggccgtctcggtcaggatggaaaagcgctcggccggttcatcgacgagatcgccgaggacgacatcggttccgtgataatgcaggccgtcggggccgggcgtggccgccagcggcatgggctggacgaagcggtcgggcgttcggcctgcgttgaagaccgcgccgagacgttcgcgaagcgcaatggcagcgggatcgccggcattcgggtcggtgttggtgccgagaagtttggccgaggtcgccaacgccgcctgcatctcaggggcggagataaagggtacgagttcgatctccgagggcaccggcgtgccggtcgaccacttggtgcccatgccgccgacattggcggccgagaatccggcgaacaggttttcatcctggggatcgccgtcattggcgatgaacaggcccgagcggcgcagcagcgagccgtcgaagccaccggcgcggcgcgcctcccattcctccttgttgatcggcatgcgcggggtgcggtcgccgccctgggcgagaacctcgagcgcgccgcgctcgtcgagatcggcgacgttgtcgagatgtccgcctgtcttgggcaggatctgcggccctgcctccaccatcagaatgcgcgcctcgggccactcgttgcgaatgaccctggcataggcggatccggtcggtccggttcccacgatgacgacgtctgcggacttcattcccattcccctgcatgctccatgcacttcatctctttgatagcaaacaaggatgtatccgggtgattgtcaatctcgatattgacagtcccaaccgcgtttccgatggtggcggcactgatcgcgaggagtgcccatgaagttcggtttgagttcctacagcttccgcccgctgatgttggacggttcgatgcggatcgaagatcttttcacctggatcagggacaatggcggcgaacatctcgaattggcgtcgctgtcgatcgccccgcccggcgaggatttgaactacgagctgatcaaggacgaggacagcgtcgagcgcctgcgcaaggcgtcgaacgaaaccggtattccgctctccggcatctgcatcggcgccaacttcatcggagacgaccggcgggcgcagatcgaccgggcgaagcgctacgtcgagctctgcgaccgactcgacgttcgcttcctacgccatgacgtcgtgccgtggtcgctgcgggcgacgaatgcggctgagttcgaaacggccttccctgtcatcgtcgatgcatgccgggaggtggcggaccatgcggagcgtctcggcgtgaccgccagcatcgaggatcacggtttcttcatgaactccagcgagcgcgtaaagcgcctgctgcaggccgtcgacagcccgaacttcaagatgacactcgacgtcggcaattttctctgtgtcgacgaaaacccgctgaccggcacgcgcgcatcgatcgcgcatgcgagcttcgtgcacatcaaggatttctacgtgcgcgccgaaagcccgggaccgggctggctggagacgcttaacgggcagttcatccgtggttccgtcttcggcttcggcgacctgccggtgaagtcgcttctgaagagcgtcgtggattccggctatgacggcttcgtatcgctggaatatgaaggcaacgaaccgaccctgttcggctgccagaccggccttgccaacgcccgcagactgttcgccgaactcaggggctgacatcgcgggcgatgatcgacccgctccttgacgagatgtgtaaaatgcgtattttacacatttatagggagatccacggttatggctcaagctttgaaagtgtctgctaccgagtttgctcgcaaattcacgaccttcagggaacgcgtgcagtcggagggcgtcatcgagatcaccgcccacgaccgcaccatcggcggcttcctgtccgccgcggaactcagccactatcacgacatgataaggcgtgagcgcgaggtgatacgtgtcagcgaaatggacgacgaaaccatggcgttgatcatgaactctgagtacggcaaagtttccgagtgagttacccgacgccggttgcaggccttgtcgtccggtacaattacctgtgggataaggaaagaagcgaaggtttcgctttgggcagcaaggatcggccttgtgccattgtcgtgtaccactctcggaccaacgatacgattgtcgtcccgatcacgcattcaccacccgaacttggcgaggaggacctctcgatcgaggttccggcagaactccgtagccaactcggcctggatgacgacgccaactggattcgtgtgagcgaggtcaatcggttcgagtggcccggcatccatctcagggcgctaccgtccgatcccagccgctatcattatggaatgatcccgcctgaactcttcgagctgatcaaggccaagcttcatgagacgatgaagaggggacgggtggctttggccaagcgctagcaaaatcagggcggctagatcaacgtcgatattcggtcgacccgttccttgatcgccgccagccggtggcggtcgccgccgggaacctcgacggaagcccagccggaatagccgacatcagcgagcgcgcggttgaccgccggccaatcgcagtcgccatcgccgatctcgacctcgaagcccttccaaggaccctcggtgttcatcttgtcgaggctgtactccttgacgtcgatcttcaggatgcggtggcccagcgcttcgatccagtcgacgggccgtccgtagcgcaggacattgccgacatcgaaataccagccgaccttcggatggttacaggcatcgacgaaaccggctgcctccaaggggctcagcaggaagtcgttccatacgttttcgagcgcgatcgagacacccgtctcttccgcgtgaggggtgatcttggcgatctcctccagcgcacgggtataggccgtcttgtagctcgtcgggctgttgcgcacgacgccgggaaccaaaagcaccgtgtcggcgccgtagagtttggcatcatcaagcgccgtgatcatcgagtccacgcaggcctggcggaccgccggatcgccgtcggtgagcgggctcttccagtgcatcgcgttgacgagacccggaatggcgacgccggtcctgtcacgcgcatccagcacctctctggacggcaggtcattgggggaatcgagttccaccccgtcgaaaccgagatcccgtaccagctgaaatttttcgaggatggacagactgccctcttcgatcatcgaccatttcaggctgatcttagccagagggcgggagggccgcgacgcggctgggacagatgcggtggcaggatcggtcatgctcatttctctgcttagaaaatggatgcgtagagcggactatgtcattgaagtcgcgagctatcaatgcctgttgccagcctgtctgaacttcgtctggacggtgcatgtccaggcgcggcgaagggcgaaataaacatggacatgtgcccgttttggcgggtttcatggcttgagccatggcattggctggactagtccaaggcaaaagcgatcagacgcggtgccggagaccatggactttaaaagtagcagccccaagctgcagggttacatattcacgctggccgcggttttcatcttcgcggtccaggacagcttttcgaaataccttggcgaacgctactcgccgatcctgatcacgatgatccgcttctgggcgttcgcggccttcgtgatgctgctcgcagtccgcaagcccggcgggatacgcggcgccttcgtgaccaagcatccgctgatgcagatgatgcgcggtgtgctgctggtggcggagatcgcgctcttcgtttatggcctggcgcataccgggcttgcgatcacccaggcgatcttccagtcgacgccgctgatcgtgaccatcctgtcgatcccgtttcttggagaacatgtcggctggcggcggtggcttgccgttgtcgccgggctgttcggggttttgctgatcatcaatccgaccggtggcgcgttcaacctctatcttctcgtgccgcttgcctgcgcgaccatgttcgcgctctacagcgtggcgacaagggcggtaagcggcaacgattcgaccttcaccagtctggcctataccgccgtcggcggcgccgccgcgatatcgctgcttggcccgttctactggacgccgatcgccatttcggactggccgatggtcgcggcgctttgcgtctgcggcacggtcagccactattgcctgatccgcgcctatgattcactgcaggcttccgaggtacagccgctcgcctatctgcagctcgtggtgggagcggtgatcgcggtgatgttctttggcgagacgctgagctggaacatgctggtgggttcggcgatcgtcgtcggcgccggcctgttcaccatgtggcgggagcatcgcgcgcagtccaagaacaacccggcgtccggttccggtatcgccgaacgcccctagagcctttcctgcttagattgaagcattctgccggagcaggttttcgtcagggcaaaggcggttggcgaagggcataccccaggtacgtccgagccgatcgcctttgccctggcggaaagatgcccggcccctccggggttggctgaaacgggccggctgatcgtccggccggcttggccgtatgctttggctacgacgcgcgccggccgggcgaccatccgactccgtttgagccaacagaatgcttcaatctaagcaggaaaggctc

SEQ ID NO: 2 - DNA, 669327 bp, Rhizobium matallidurans
  source 1..669327: mol_type = genomic DNA
gcccttgaccttgtccagccagccatcgaccctgtccagcaggatgtcgtccaggcactcgccgtccctgcaaaaacggggatcggcggaatcgggaaggaattcgtaagagaccctatccgtcaccccatagctgccggtgtcgttgtcgagccacgataccgacaccttggcgcggccgagcacgtcgaggacgttttccgtctcgaggcccttgcgatgcgtatagtcgtttctcggatagatcgagaacatgcacgggacggagatcgcggtggccgttccgcagctgctcgtattcgggaagtagacgacgttccgtttggcgagttccgggttggtgtcccgttcatatccggccagcgagaaatcctgcgcgcgcgcggtctcgcccagcacgatgatcgtcacgcggggcttgcctgttgcggcggtgttgacgcgccttgcatccgtgcctagcggctgcgccacgacattcgcatccttgccggacgaaatggcgaaacgtacggcgctggtgatcggcacaaagggattgaaggtatcgagcaaatccttatgcgcgcggccgatgccggcgaaagcacggtaatcacccaagccgatcacggcgaaaaccgccgtgcatgcgaggatgaccgccgtgttatgtccgagcttcctgaggatcgggcgatgccggatacgaacccagacgatcagcagcgacggcacgatgccgctgagcagaagatgcagcacaaagcgcgcggtgatgagacgtccggcctcggcattggtcgagacgacggcgttgcggatcatttccttgtcgacgatgacaccgaatgaatcggtgaaccaggatgccgcggaggcgaccatcacgaggaagatcaagacaggcttggtgacgtatttggcggaaaagaaggtgacgacgcccatgctcgccgcggcgatgccgaccacgaaaatcgtgaagccgaaccgatctccggcaaaatatccgaaggctttcgaccagaaggtctgattggcggcgatcaacaggtaggcggtcgtcaacaggcagagcgtcacgctgccgacttccggccggaagaaacgtggtgctcgtctggaattgctgtcgttcaactcgatgtctccgcggtgctcgtgcgggataccgtcaaggagaacgatggctcgtatcccgccaatcctcgacgggatgcccttcttttctgacataggcctgaaagagccattggcgcgggacgcaactcgcggcggccgatccgctagcccttgagaccgtaatgcgtctccaggcgatcccagctcacatccatcgcataaaccgacgagatgtgcgggatggcgacatgtccgtaacgcacggagagttggcgttcagcgacgtcctcgtccacaccggcgacctgctggctgtacagtaccgagaccagaccagtgcgatcggcgccgctttggcagtgaatgaggatcggcttgggcgcggccttcatgatcgcgaccagctgatcggcgcgttccggagtcagcaccttcccggaggacatgccgaaatcgatatgctcgacaccgagttgctcggcggtggcgacctcggcgttgtaccactgcgcgttcacattctcgccgcgcagattgatgatggtcttgatgccgtggtcgcggacatggcgctccagctccgccggagacagctgcgcggatcgatagagttgacccgagatcacgcggtgaaaattgccgttcagctgcagatagccgatatatccgccaaacaacgcccccgccagcaacacgccagcgactacgccccgaaacatcctcttacggccgataacaaagcttttcacgggaacctcggtgctcaaaggaccggaaaaccttgaacgacgaggctgacggccaccttaaggccggaggttcgcgcaggcgaacggtcagcgacgcggctttggaaccgatgcgctgcccgcgcgcttcgacacacgcgccatcgctggcgtcattatcatccgctgtaaacacgtagaaatggcggatggggtgtccgtcaaactgccgtttcatggtgtctcagatcgtcgcatttagtcgttttattccagcattttaggattttacccgtatcgacatgtgtcatgctgccccatagaattgcagtcatctgttagggtaattgttggggtagatatggctctcgcactgaacaaactgagcgcccgcggcgcgactgcgatcaccaagccgggccggcacggcgacggcggcgggctttacctggttgtcgacaagagcggcgcgaagcgttgggtcttcctgtaccggcgggatggaacgctgcgagagatgggtttgggcggcctgaagtccgtcacgcttgcgcgggctcgggagcttgccagcgaggcgcgggcgaaccttcaggcgggcgttgatccgatcgcagcgaagaacacagtcccggttgccgttcccacgttcggcgaggaagcggacgatttcatcgatgccatggcgccgcagttcagaaacgcgaagcacctcgaccaatggaagatgacgctgaaggtctacgccgagccgctgcgggcgaaacgggtagacgagatctcgacggttgacgtgctggaagtgctgaaacctatctggctcaccaagccagaaacggccgctcgcctgcgcgggcgcattgagcgggtgctggacgcggccaaggcgaaaggccatcgctctgagccaaaccccgccctctggcgcgggcatctggcgaacctgctcccgaaacgcaagaagctgtcacggggccaccatgccgccatgccgtatgaagacgttccgacgttcattgctgatctgcgggagcgtgaggcaatggccgcgcgagccctcgaattcacgatcctgacggcagcgcgaaccggcgagaccttcggtgcaacgtggcgagagatcgacctgaaggcggcactgtggactgtccccgccgagcggatgaaggccggccgggaacatcgcgttcccttgacgcctcgggtggtagagatcctgaccgagctttccggccttggtgccgagcctgacgactatgtgttcccaggccagaaggaagggcgcccgctgtcgatcatggcaatggacatgatcctgcggcgaatgaaggtcgatgtcacggtccacggcttccggtcgtccttccgcgattggagcggcaacgaaacggcgtttcctcgcgacgtggcagaagccgcgctggcgcatgtcgtcggcgatcagaccgagcgggcgtaccgccgcagcgatgcgcttgagaagcggcggaagctcatggcggcttgggcaaacttctgcgagccgaagaagccgggcaatgtggtcgagatgaagcgggcaaagcaggcctcgtgaggctggaggggaatatgtggccgtttcgatcaaagatgcagaagaagctggacgccttgcaggctgccgtgaacgctcgccgtgttgcgatgggggccgctgtagaggtttgcaatcgcgcggttgcccaagccgaatgcctggatgcttccttcagcgatgacgagcggaacgcctttgttttggcgcgggggcgttttgggtacttcctgaacgccttactggacgacgttacgaaggcagacgagagcatttccgaacttcggggagcggccgctttctcccaagggcgtgacccccttctactggccgaaaggctcgccgagacagagaggcggcttgcccgaaccgagcaaacatgccgtagtctgggcgcagcatgcgggcagatggtagaaattacagggcttcaacactagaggccgtttttcagcggcgggggtgatatggaaagcacgcagtcagatcatattgtttcggggcggcactggatattgttttggctgcttgttttgttcgcctacctgacggccgtcgcagtcgcgtatcagtgggccggccctgccggctacgtggccgtaccgaccgcgataggctatttcatcgtgcgcaagggcgctgctcggggcaacctcgctttgagctacgctgtcttcgccctcctgctcgccgttctggtaggcggcgaggtcgtaagagcgtcagacaagacagaagcgtccatgattggcggatgcctcgatggcaacgcttgggtcgctcaattaccgaacgcgggtgatcgggagcttttctgcgggtgtaccgctgaaaacatgaagtggccggtgatgcaaaaattggcggtcgcgaccttatcattccgtgagcctactccgatacaagatgacgctgcgctggtccaaacgagcgtagaagtcgccaacctctgcgctgccaagcttccggctcaatgaatgcgcggcaatagcatcaccgcgcgatctcacgctcgaagaagtcttcccatgatccggcgccctgcggcggccgggtcacacgctcgccggtttcgctgatctgggacgcgccagcgttcagccactccatggcagcctgcacgtcggagttctcagccaatgcgttgccagcgagcccgatcgcctggggcgtcaaagccgtcatctgagcctgcgcgcccgggctcatggtcttccggttcgtgttggtcatccagcgcctgaagcccggctgcgtaatcagggcggcgaggccgcgcgcgacgactgcgccctgaaaagccttgcccggtgacgagagcatgcccgtgactgcggcaccggcagcaaggccaccgattgcgctggtcgtggcgtcccgttcctgccggcgggccgtgatcaatgccagatcccgaagggcctgacggttctcgggcgacacgagggcgttaatccgatccgcctgctgacggcttacgctgtccttgccggccccgagcaattccgcgatgccgctgctatccgcggggttcgcttcgttgctcacgagacggcgcacggctgacatgtcgccaccgccgcggctgatggcactctcgacaatatccgcgactatcccacgctctacctgggccttcatcggcgccggcagcttggtcatgacctgcaaggcctcattgggcgaagcccggcgatagagccacggcaccaactcctcggcgttcagcttggccgccgcgccgttctcgccacgcaggaaaggcccgattgcgctgtcccggtactgtttcgcaatctggtcctcggcgacggctgccgctcgcagttggctcatgatgttgggcgttccgttctgggatagcgcctcggcgtcgagatacttcgaacgattggagatatcgacggccagattgcgaagctgctgagcgtccgcgacgccgaagagctcggtcacggcttcatcatcgagccggttcaaccgctctacgagcccgtcaacgttgaccaccttgcggccctgccgcgtctggtcccgcccggtgtccaggatctgctcgacggcgctgcgacgtgtcgcggcccattccggcgaagtggcccccatcaggtcgcgggtctcgcggatcacgtccggattgcctcggccggaaagcagccgctcgaccagcttgttgtcttccacaaagccggattgcgtcggttcgcggtaggtctctgcaatacccttgcggttgaagcggtcgatgttctgcgcatagaagcggttcgcctgggaaagcgcttggcgcagttccggcgtgccagcacgggcaacgctctgatcgatcgaggtggagatcgcttggttcaactggttcaggtagcgttccggcacgcccggcatcagcgttttgtcgtcgatcgcatccatgatcagggatcgcatttggcgagcctgctcaatcgtcacgttctcggcgatgtcatccacgccaagcaggaagcgggaaagcccctgcggcgtgaaccggttactcgggctgccgtctgctgtaggcggcagcgcttcccggatgcgggcgacctgttcgcgaaccgggccgacattgacgattgcatcctgaccgcccggagcggcgcgggcggcatcatagagccgcttcgcctcgtccttgaattcctgtcgcgcccggtccagccctgcacgggtctgctgcccggcgccttcagccgacatcaacggaccttggcgctcggtcaagctggcctggttccggtcaatggcctgatcggctcgcgtcagggcctgctcacgatcgatcgtgaggttctgtcgctgcgtcgaaagctcgcccacggcctcgcgtccgacttggttcggatccacgccaccggccagatcgtcctggaagcgggcaacggcctgatcgccgcgctggcgatactgccgcatcgcctcgctcgatccggggagcttttcaagcatgccctccattcgcgggataaacccgccggcaccctcttcagaggccagcggcgcaatgtcgtagccttgggagcgcaggcgctcggatgcctgccggaactcggtcgcgatgggatcagatgccgacttggcgaaaggtgccttggcccaattggtcgcgccagacgcgagcctgccggccccgccgaacatggcgcccaggagcgcgtcaacgctcgcctctccggcagcgcggggcagaacgtcgtcgacgatcgagggctcgacttcccggttctcggggaagagacggccgacggtctcgccgaccatctgagcgcctgcggcagacatgaccgccgaagcggggatgcccacggcggggctcacggaataggccggcacggatgcagccgcgccgccgatggcgccgacgagatcaggcacgccgcctgacatgctggcgatatcgcccatgtcgatgccgggcggattgaataggcgttcgatgccgtccttatcccgaacaacgcgccgatcggtcggattgccgaactggtcgttcaggacataccagccttcattctccgcgccgtaggtgtttgtcaggtagcggtcgcgggcttcgggggtattcaggaacgaggaataggcccgctcgctgagcggagcgccgccgggctggatgcctggattggtcgcctcgatgcggcggttttccttaatgcccgcaacggcctgcattcccgagccgaaaagctcgcccgcagagatctcggaaggcggcatgccgaagatgctgctgagaacgttatcggccatgtcgagcggagcgcccaagacagtgcctgcggtatcaatcgcacgctcggcgcggcccggtggcgggactgctggctgatcggggccaccgggaacgccccggctgtctcgacggtcttccggccggacttccatctgttcggcctcggtgcgacggcgacgggcgcgagcaagagcaagggctttttgctgttcaggggtcatcggaaaagctcccgctcttcaggggtgagaaactgccaatcggctggatcgacgccgggcgggggcgactgaggcgcggcaggggcctgcgcgggctgctgcggttgcaggctgtccattcccggaacctgggtcgggccgcctcggctggtgctgagcatggtctcaacgtaggtctgggccagtgcgggcgagatcgcgccttcatcgacaagctggcccacgactgcccgattgatcggcggcagtgttcccccgccctcggcgagcgagccggcgaacttggagcgataggcgctgagagtcgtaagggcggcaattttggccttggcagaaggcagagactccccaaggcccggacttgcgctgacctcttgggccatcctgcgatccgtctcagaaatgcggtcatcagcggcaagaacgcgagcgagacgcatggtcgtggcctgcatctgggaccgcagagcgacaacgtctccgcgtgctacttcgggccaaatctgcgcgccgtagcgggtcagaacgtcgttgaaattgcccgcaacgccaacgtcagaggccgagatgttgtcgaacagggtctgaagctcctgcgcgctctgcgtcgccgcgtcccgctggccttgcaactgcgtctgttgcgcaacggtgttgcccgccccgcccgtcgtgaagcggacgccgccctggccgtcagcctcgaaggatatgccgcctccagtcccttccttccgaatgacgttggggaccacctgaccgttgttcgcgttcacgatccggccatctggcccgacgatgccggggaagcgaatttcctgcccatcgggaccgactgccagatagttatcgacgcgctcggcgctggccggctcatagggctgcgctcccacgcgggtggcagcgcctggcgtcatgaacgcgggctggttggtgcgcggatcgatcgccttcacggggctcttatcgcccattatggcgtccatcaaatcggtgtctgtcagacgcccattgtcgagcaggcgctggttctgcgccgctgtccattcgttggcgttcaaaggtttcggcgcgccttccaggatctccgtgaggtccgttgcttcgacggtctgggaaggcagaaaggctcgctggccttgatccaggatcacaggcgcggccatttggcgatccatcaggccctgttccatcatgcggcgctgttccagcgtcgtcgcgttgccctgatcgaccccatacttgttgttggtgaagttcagaacgcccgcaccggtcccgacacggctcaaggtttctagatcaacattcgggtccagcgacatgtcgaagtagcggccaagccggttcatttcggcgcggcgggcgtctgccaaggcgaagttggccgtatcggcgccgccttcagcgcccataggcggggcgaacaagccagacaggttgctggcgatctgggccacgtaaggatcttggtatacccggttgctcttgatggtcatggtctcggttccttcagtgcgccgtcatcggctcgggatagaagacagcggcgagagggttgcggctgagagcgtgagccagatcgagctgagatgaggccaccacgagatcccgaaggtgcagggctcgaagctcgctttccagaacgcgggccgttgcgagcagccaaacgaagcggtcagcatccgcgcaggtcaaagccgcgttggcagagccgagcgcgtgatagatgtgctcggctgcgatcctgccggcggtctcgacggcgacctgtggagcggctgcaaacaagaggcgctgggcatcggcagagagggccggatcgagcccgcccaggcttgcggcggcaatcagcgcgttcagcccctcggcgcaatggagcaagacgttcttgccctctgctgcgctgctgagcttcgagactgcgatttcgagataggtgtttccgttggtcatagcgattacccgtagaaggccggttgagacgctgctggcttttgcttggccggcccatgcttcctcaggcgtcggccttcgatctcgctccggtattcagcggcgcgaagctgaaggttcaggatactgaccttgcacctgtcgtcggcttgacgatcgccgtcgaggtctcccgcgtcgatgtcccgcacgagccgggccgctgcgaacattcccgcttccaggtcggctacgctcacgccatctctgagcgaagagatcgccccgccaagcccctcgtaaacggcggccagaagctcatgggtcgggccggtgtcgggctgatagtgctcgtgcttcgacgccagcagaaggaggctgccgagaccctgccgcagctcatgcgacgggttgccgaatatgtcgacggcatctcttaaatgcttggcggccagccttgctattcggttcgcttcgatggggttcacaacattacctgcttcgacgttgatgttgtcgaagtttcggctttgctggattgggatagtagccctgcgtttccgcaagaaatctgcaaacggggcggcgggatcgaaacgggtcatggtacatcgcaaggtcacgaacagtcgtcggcggggtggctgacagggtttgttcgattgacgagatcccagagggacggcgagtgcgactacccgagtttcgcaattgatccggcactgaggaatatagcatctccagggcttcgaggccagcgcggcgggtgcgttttgaaaggtccgaacattcacggaaccgcagttttgtagcggccccgcccgccccggtcggagtagggtttgtagtgatgggcaggggtgtgggcgggggtgccggatagcagcagcaaggcgcgggcgctgctgctatgcggcgagccatgcgtttgcgctggtctgcataggctgtacctttggcggactacataaacagccatgacaacatggtatgataataaagcttcaccaccctaagcagaccgtgtatatgtagaccagttcaaacagaccattggagcatctactatgtttgtcagggcctacctaagagcttccacacgggagcaagatgcagagcgtgcgcgggctgatctggaagccttcgcggctgaacgcagcgttcccatagccgcctggtacatcgagcatgagagcggagccaagctggaccgtccagaactgtttcgcctcttgcgcgatgcccatcccggcgacgtgatcctgatcgagcaggttgatcgcctgtcccgcctcaatgaggatgattggaagcaactgcgtgccgagattgcggcgaagcggttgcgcgtagtcgcgctggatctgcccacaagctggcaactcgctgccggcggtaacgagttcactgattgggtcatggacgcagtgaacgggatgcttctagacatgctcgcggccgtcgcccgcaaggattacgacgatcggcgccgcagacagaaacagggcatcgccagcgccaaggagcgcggcgcctatcgcggacggccggaagacacaaaacgcctcgggctgatccggcagctactggacgagggtaaatcgtgggccacggtcatggaaatcacgaagtccagccgcgccacggtcgccaaggcggcgaaacggctcaaggctgacgcctgatacagaaaagccccggtgatgccggggcttttgtctatgtggctggttagcctcagtgcttcgttgcagtttcgttgtgggcattgcagatggactgcgcctgttcagcgagagccagcgggacaagtccttcaaagattacccgccctgtatcagcaatcagatcggcgtaatcaggatcattgagcccgatgatcgtgaattcggcgtctgcgcattcgtccagcatcgccttgatcttgagtgccacgtcaaccggtgcgctgccgtcgattacaaagcggtccagctcgtagggtgtcccgcgcattacgggatcgctccagctcataatctcaagtgccgccgtagtgtttacggcgtcgaggcgttcgcgggtgttaaaatcgatgaccatggtcagttgctccgtttggggttcgttgatgacggtccaaaggtaatacattttgacgctaagtcaatgattttatttgtctttttgtgctgcattcgtctcgtgcacgacgatacagaggcgacgaaacctagccgaaaacgtcgccgtcctgggcctcggcttccaattgcgccagcagcgcgcggcggtcccgttccaactggtcgcccaaggcttttagctcggcggccgtcaactcatgtaattgcttctctggaccttccggcccggccgcaaagagggaattcgcccgcatcaatgaagacgacgccgtagctctagcatttgcaggcgcattcgggtcctcgcagatgctgattgccgcatccacgcaggcctcaaggcctctggttctcagtttgtgaagcgcccgcatgcgggccgctgcttcttcctcgttattcatgaaaagacactttcgtcattctgttgctgttctgcctgggccaaggcccggtatcgatcgcgctcggcctccagataggcagcgtgcgcttgtagcgctgccaattccggcgagacgggccgctcgggctgttctgcccgcttattgaaatcctgcgcggctttacggtcggcgcgtctccgctgccgatcggccttagaccccgctttatgactgcgttgccattcttggtgtttggctcgctgctcgggggtcatcttcgccaggcgccgttcccgccggcggcgatttcgttcggctcgcttcagcttttcattcagcttgcgttgccagtccttcgatgtcgcggcggggtattggatcttgtgccagtcgtcaccggacggaacggcgccaccatgccaccgacatttttgctttccggggaccgccaggtttccacagcgttcgccagtcgatcggcttgttccgttgcacttcggcaggtgcggacggatctccgattgaaaccggcgcagggcggcgcgaccgacttctttgagcccgtgactagcccaagcccgttgccttggtgtgcgctcagccatttcccaccccctgtttctggaagtaggtccatggcttatcgcggcttgagcatcctgaacggatcgcaccgacgagcaagccgacaaaacgtccagaccaaatcgccctcgaaacgctgcggcaaatgcggcttgcgcgcgcggttagatttttacattcacaattagttcccacgagagactggggaacgaaaaataaagaagagagagaaaaggtattttctatctcgcgcacacaagccgcatttgccgcaaaatcctgtctagtcacgttaaatgtctcctattttccggacgtttcgtccgcgagccatcttttggcctgcgcggacttctcgatagcggctcgcttagcttcccgatctctgcgctcccattccgcacgggccgcaaaacgagcgtggatcgtgggattgacgctgcaccgggccgggccgtccgttccttgttcggcagttctgagccacccagcgttttcgagatccttcatgatgcggacaacgagcttcttgtgggcctcgccttgcaagctcttgcgcacagagtagatcgtcctcggcgtcacgctgtccacctcgggatgcgtcagcagatagcccgcgaaccagcggctttcttcaacgtcctgcccgagatcgaaatactgccgatagaacgtcatcgagtggcgcagcaggaaccgggcgaagctgccggcgcgctcgaccgtcgccttgctgacagacaaagtgggatcggttaggccgtagctggcgaacatgtcgatgcaatggaacgtcagaacgaggcgaggaaagaacttgccccacttctcaatatggcccggccacgcaagcggcatcccgacgagacccttcagctcgttgatgctctcggccatctcctggaacagttcctgagcggcttcatccatgcgcaccgctgacgggctgccgtagtccgccatgatcagcaccctaaggagagcttggtagtcgctcgccgctctcgtgtcgggagcttcatcgacgcccttacgagccttgccgtcgtccagaacgaacaggaaccgttgcagcataccgtccgcgcccaggtcttttacggccttggcgatcttctcaggctgcgtgccagccacgatgcccatcagggcctgttccgcccggatcgtgccgggcgcgacgcgatcatgcacaatagtgccgccgtcgaacatccgcagcatctgggtccgatcaccgccgccattcgccttgtatgccccgaagctttcgaagaagctcatcagttcgtcaggagcgcgcagaatgccgcgcgggttgtcggcatgaattcgaacctgtttctccagcgtcacgtcatcgacggcggtgcgacgcatgatgggctcggcgcccgcagacggcccgtccttccgcttcttgttcgcttgggttcgttcgatccacaagtcatgctgcgccttccacgccttgtagaactcgccgtcgatgtcctgaagcggcttggttgccgcgctgatagtcggcgtcttcacacgcccaggatttgcgacgagcgccagccacaacgaagcgggctcggtccagcccgtgtcccacttcttgacctggatgcgcagcgaggcgccaattgcggcggctgtgacgccgatcgcggcggatgcggcgaaggccagcgaaacgcctttgcgccgagcttctgagcgggcgaaccggtcgacgatcggcggcagggcgttgtcaggaagattgccgagatccatcgggtcttcgtcgccgaagatatcaagcggttccggccaatcggaaacagcatcgtcgctatcgggatcagttgccgatgcttcgaacacttgctcgggatcaactgctgaacgaggtggcgctggtttcgtacggccccagcatcgcgcaatatcgtgttcagttagctttgcttcaggatcatcgcccggctgcaccgcatgatcccagatccacaagagcgaggcgaaatcgttcacatcgaagcggccgtcccggcgaagccgcgacgcgagggcgaaccgacgccccgaaccggtgtggtcactgccgtcatgctcaccggtttcccaaagtcgttccagcttcggatttacccgccgcgcgtcttcgaacttctcccgcagttcggggtccaggtcgtcataacgaactgcctggaacgctgatgcgagatgcaattcagactgagccgctgcgacttcaccctcatggtttgccgctttctggggtgtggcgcgaggctcgtagtgctgcgccaacgcgtcgagggtgtagagcttatcggtgatgcccagcagcttcgcctctgctttcacacggcctttgcggagcttgcgtgcatctgggagattgatcgtattaggaattcgaagaacacggtcgatgttctgtgtcgcgtcaccgccgagctggtggcctatgcctcgcccttgctcctctgccgccttcagatgcgggtcattgtccacgtcgccgctaaacggcaactttgcttgcagcttccagaccatctgaacaccggagccgctgtcgatgacaatcgagggcggcaccggtccggccgagagatcgctggcaagcttgtgaagccgatcgcgctcagcactgagggcaaagccgtccttggggtcgacatcgctaaaaaccgcccgaatgttggcgatatcggtttttgccaacttgccgtccggggcgttgggccgcggctcggagaccgaaaagtaaagattttgaacgccgttccagaccttgatgtaatcggcgatggcgttccaactgccaggcggaaagcatttgcctttcacaaagccggttttggggtctatccgcgtgatgttgtgccagccgtcagcatccagcgcctgcatggcgagaatgcccggatgcaaggtggcttcctcgacggttgctggcggggcttgctgagcgggcgcagccgccgcaggcttcggcgcaatgatatcgccgaaagacatgctctgcctcggcgatgccgtaccctcaaaaggattgtttttcagcgggtttcgctctatattcacggtgtatccaatcttcattgaggctcgctccagttcgctgctgggcgggcctttttcgttggtgtcagggattacttacgaccaaccggagctttacccgcggacgccgacgcgcggctcttgcgcgcagcaactgcgctaggcagtcggcatcaacgagtatcgttccggtgctgcggtctgctgccagcttcttgcaagccacccacgcccgcagataggacggtgacaggccagatcggtcggcagcttcgcggatggtcagttgctcgggatttcgggtgcacagatgcattggtcgcctcctggtagtgtatggaagagacgcaggatcaaacgagagcgtttgagataaaatcgctatctcgaagtcccaaacttctaaaatcctgcaaggtcagcgtccggtctacggtcgcctcgaagccgaaaacggcctcaatccgatcagcgagttttgtgccgcgaaagcctttgaggcggcgatcggtcgaagccatgcgatacagcgcgtcgaaaaccgcgagtggtcgcattaccttttggtggaccaggacaccggcaatgatgccaatcccgaagtctgcaaatcgtggagacatttttcgcagcacgtcggcgtcatacatgtgatcgtagacatttttgtcccagtcgtggatctcttccagacgttcccgacgctttcttttcgctaggtagcctccagtgagatcggatttcacctccaagccaccataagctgttaccgccgaccgaacgccccacgcgtcgagggcgctaagcctgccggttgctggatgcccttcgttgtagaattcggcgacccggttccacagatcccaatccgctgcttgggggttctggtcgcgcatctgttgaaaccttgccgctatcagcaacgtttcaggccgcttcggttgtcgcggttccagactgacatcacctctgtcgagacggttccaggcgcgcctgtgccttgagatctcgtgctccgcaatctcgatctttacggcttggtcagtcatgtggtcgagcatttcgtcggtcgcttcagggaagcgctctgcaagcctcgcgcgtgcatcaacccgaaatatcaggcgcgcgtttaggtccattgccgggttccgctctggcgctcggctgagatggtagaccccgcgagcctcaaacgcgagacgcgtgtcttcgtgggggcggtagtagggttcggaattgtgagcggccatcactgagccccctttgcgctgcggctctgctcgccggctgctggcatttcctcgatcgtgtcgaggtaggagatcagtgaaggcgtctttacgacggtcttgttgccaaccttcgcaaaggtcagtttcccggcgccatgcagacgatagagacccgagcgggatattcccaggagatcagcggcgacacggagaggaagaaggggcttctgagcccacggggtttgatgcgagatcgtcatcgagacgccctttcatggcgggcgcctattcggccccgcgttaacggaaatcggtggccatcgctatcgtcctattcttccgggtcttcagttctacaaatcatcagcgcaacggtagggacagactgaaccaatctgactcggttcgcaaggcgaaaaatcggatctaaactactgtaatgtaagacgttttgcgtcgtattcgccgtaactttctggtcccgttgagataatccggcttccatgagttcggaaaaatctgcatctccccctcacgcgtctggatcaggccgcgcggtaaaatcgagacgaaacagggcaaaccgggcgatcctaacactgcgcacgagttagggtaagcgttggggcgaagcctcaaagcgtccaaatttgtcaataatttcaatgtggagtggcggatggggtgggattcgaacccacggtacggttccccgcacgacggttttcaagaccgttgccttaaaccactcggccacccatccacgggtcaatccggtgacgagttgcggaatccgcacacgtttggtgtcaccaaatcgggtttcgaaggctttatagctgcttcgtcgccaccgtcaaccagccccgccgcgtcctggcgtcgtgttctcgcagaatcaggcaagagcacgcgcgaagacgctggatgagcgaaggaaaaggacggtcagtgcgcggtggttttgcggttcgccagaagaagaatgtaatcatcggcggcgtcggcgatcgccatggccacctcggccgccgcccagccgttcttctgcgcttccctgataatctggtggagtgcgggttcgacgtcggcgcggcaatcgagcaaacgctggtcttggttggtgtcactgcgagctgactgaagattgatcatctctgttacccctcatgtccaaggctgtaccatgacatagattgcaggttgagcaagggattgctgatcaaaacggaaattttgcccgcgaatgaggtttttgaacgacactcgcctaacgcgatcagtcgcgcaacctaaccgcaagcaccgcaacgacgatcatttatatgttccatagttggcgatacatccttgaaaaggatgaaacatacttcaatagaaacaagacaaccaaatatctattgtcgacgcatcgaagttattcgaagtattattcgccatcacaaagataagtccggcgcacggatttcacttttatatttcgcattaattcaactctatacgatttaccaaatacttccaaaggttgatttaatttgagccgggaagctatacggaaacaacgttgcggcggaaatgaagaatcatgtcgatggcactccctcattgattggtatgcaatggatcggcactcgacaatgtgtcgagtaattctataaaaatcccccctcggttgtatttcacatttccgtgagacttcgcatcgctagtgctattccaacgtccacggagcacgcctatcgaaaggcgcgccgcccggcggcacggcacgcaagaaatctcgcgctaatatcatgcaaaaaggccgagctttgcggctcggcccatccggtctccgtcgagatattctatcggcggctcatcaggccaaacaagtatgccacgccggcggtcaccgcgatcgcgaggatcggctcctcgcggaccttgtcgcgaacgcgttccgtcaggaccgaggcttcatcggcaacggcggtcttggcgccctgccccagcgcaacgacgctctcggacaaacgcgccagatcttcccgcaatgcggccacctgcgcggacagatcgtccgttgcgatttccgccttgacgcgcgcggctgtggactgtgcggaggcggttttcatgtcggccattgtttgctcctgtttcctgggaatgctgttcaacgaaatagcgccgccaaaggttccgcaagcgagcatcttttgtcgttggtcggcgccgcgaaacggggctgatatagcgcggatgttttcgcgcgataacccttcaattcctgatgcgtttgctctaaggaacgtccaatgctttgcccgcgaacgggcgaatatattgcgaggtttgcgtttcgatgttcgatcttctccgtagagccgcccggacctgggccgccaagctcctgttgctgctccttgtcgcctctttcggcatctggggcgtgtcgagctccctgcttaccggcagcaccagcacgaccgtggtcaaggttggcgaccaggaggtcggcgtcaacgagtatcgcctcgcctatcagcgccaggtctcgaacctcagccagcagttcggtatgcgcctgacgcccgagcaggcgcgcgccttcggcgtcgaacagcaggtgatttcgcagctggttgccggcgcttcgctcgaccagctcgcggcggacatgaatctcggcctctccgaagaccgcctggccaagctgatcggcgacgacccggcgttcaaggccgtcaacggccagttcgaccgttcgctgttcacctcgcgcctgcgcaatgccggcatccgcgaggacgactatatcaacgagcgcagcaaggtcgccgtccgcagccagatcgtcgatgcgatctcgaacggcttcacgccgccgaagacgctcgtcgattcccttaagctctaccgtcaggaaagccggggcatcgagtatctgctgctcaccaacgccaatatcgagcctatcaaggcgccggccgacgacgtactggcgaaatggttcgaaggcgccaagccgcggtatcgcgcgcccgagtaccgcaagttcacctatctgaaactgcagccggccgacatcgccgacgctggaacggtgaccgacgatcagatccgcgaggatttcgagaagcgcaaggacacctaccgcacgccggagagccgcacgatcgagcagctgaccttccagaacaaggatctcgccgacgcggccgccaacgcgctgaaaaccggcacgaccttcgaccagctggtgaccgaccagggcaagaccgccaacgacgtgatgctcggcgaattcaccaaggacaacattcccgaccagtcgctggccgacgcggccttcgccgtctcccgcagcggcggcacgtcgccggtcgtcgaaggcagcttcggcccggtgatcctgcgcgtcaccaacatcaagcccgagagcgcgaagaccttcgacgaggtcaaggaagacctgcgcaatcagctcgccgtcgccaacgcatcgcagcagatgatcaccgttcacgatcagatcgaggaaatgcgcagctcgggctcgacgctcgaccagatcgccacgcagctgaagctcaaggctgtcaccatcgacgccgtcgatgcaaccggccttgacaaggcgggcgacgccgtcaaggacattccggaacagcagcaggtgctgagcgccgtattccgcgccgaagcgggcgcggacgtcccgtcgctgtcgatcggcacggatggctatctctggttcgctctgggtgaggtcacgcccgagcgcgaccgcccgcttgccgaagtgcgcgacaaggccgtcgccgactggacggccgagcagcagaagatcgaactcgccaagaaggcggacgagctcaagcagcaagcccagaagggcaccgcgcttgccgatatcgccgcgccgctcggcatctccgtcgaaaccaagagcggcatcacccgcgggatggacgacgtggttctcggaacgcctggtgtcaacgccgccttctccggtccgatcgacacgatcgcggccgctgtcggcgccgatccgacgacacagatcctgatgaaggtgaccgaggtgaacaccgagccgaccggcgacgtgctcgcaaaccaggaccagcagatcaacgccatcgccaacgccgccggtgacgatatcctggatcagatggtctcgctgctgcagacgcagtatggcgtctcggtcaaccagcagctcgccgaacaggcagcatcacgctaaggggacattgaacgcatgaccgatctgaagcccctcctggcgaaggccgcaagccgcgaacctctcacgcgcgaggaggcccgcgaggccttcgacatcctgatgtccggccaggcaacgccttcgcagatcggcggcttcctgatggcgcttcgggttcgcggcgagaccgtcgacgagatcgtcggcgccgtcacgaccatgcgttcgaagatgctgacggtggaagcacccgccgacgccatcgacatcgtcggcacgggcggcgacgccagcggcacctacaacatctcgacgctggcggccttgatcgtcgccggcgccggcgtgcccgtcgccaagcacggcaaccgcgctctgagctccaaatcgggtgctgccgacagcctggcggcgctgggcgtcaagctcgacgtaacgcccgagatcatctcgcgctgcatccgtgaggccggtgtcggcttcatgttcgcgcagcagcaccattcggcgatgcgccatgtcggcccgtcgcgcgtcgaactcggcacgcgcacgatcttcaacgttctgggcccgctctccaatccggccggcgtacggcgtcagctgcttggtgtctattcgccgcagctcgtcatgccgatcgccgaggtgatgcgcgatctcggctccgagagcgtgtgggtcgtgcacggcaacggcctcgacgagatcaccacaacgggcaagaccagcgtggcggcgctcgagggtggcaagatccgcagcttcgaactgtcgccggccgatttcggtgtcgacacggtcgaactcgaggccatcaagggcggcgacggcgtcgtcaacgcggctgcgctgcgcgacgtgctcagcggcgcgaagaacgcctaccgcgatatcgcgctggccaatgccgccgcatcgctcgtcatcgccggcaaggcggaaacgctgcatgacggcatgcggctcgccgcccagtcgctcgacagcggcgcgaccgcgggtgcgctcgacaaacttgtcgccgtatccaacgacctggactaggatacggacatgaatgacattctgcagaagatcgaactctacaagcgcgaagagatcgccgcggcgaaagccagggtttcgctcgccgatctgaaggcgctacagcaggaccagaccccgccgcgcggtttccacaaggcgctgatcgccaagcgtgatgcgggcgagttcggcctgatcgccgagatcaagaaggcaagcccctccaagggcctgatccggccggacttcgatccgccggctctggccgaagcctacgagctcggcggcgcagcctgtctttccgtgctcaccgatacgccgagcttccagggcgcgcccgagtttctggtggcggcgcgggcggcctgcaagctgccggcgctgcgcaaggatttcatgttcgagacctatcaggtgcaggaagcccgcgcctggggcgccgattgcattctgctgatcatggcctcgctcacggacagcgatgcggaacgcctgcaggacgaagccttcgggcttggcatggacgtgctcgtcgaagtgcatgacgcagacgagatggaacgggcgctgaagctctcgtcgccgctggtcgggatcaacaaccgcaatctcagaaccttcgaggtcagcctcaccgtcagcgaggagctatcggccatggtgccggatgacaggcttttggtcggcgagagcggcatcttcacgcatgaggattgcaagcggctgcaggctttcggcatcaacaccttcctcgtcggcgagagcctgatgcgcaaggacgatgtgacggcggcgacgcaggcgctgctcttcggccaggcctcgctggcggccgaataagatgagtggagagaaggccggtctgacccatatcgacgcggccggcgaagcgcatatggtcgatgtcggcgacaaggccgacaccacccgcatcgccacggccgaaggccacgtgaaaatggcacccgcgacacttcggctgatcctcgagggcaacgccaagaagggcgatgtgatcggcacggcgcggctggccggcatcatggccgccaagcagaccagcaatctcatcccgctctgccatccgctgatgctgacgaaagtttccgtcgacatcagcgaggacagcgcactgcccggcctgcgcgtcaccgcgaccgccaagctcacgggaaagaccggcgtcgagatggaagcgctgacagccgtctcggttgcctgcctgacgatctacgacatggccaaggcggcagacaaggcaatggagatcggcggcatccgactgcttgagaaatcgggcgggaagtcgggcgacttcaagcatccggagcatgcgagatgagccttctgcccgttgcagatgcgcaggaacgcctgctgtcgcgggcaaagtccgtcatggcggtcgagaccgtttcattgactgaagcggatggtcgtgttctcgccaccgacgtcgcggcacggctgacacagccgcccttcaattcatcggcgatggatggctatgcgctgcgcggcgaggatgcccttcagcccggcagcgaactcctgttgatcgggacgtcgtcggccggccatgccttcggcggcacggtcggagcaggcgagaccgtgcggatcttcaccggtgcgccggttccagagggcgccgacagcgtgttgctgcaggaagatgcggaaaagaccgaaagcggcatccgcaccacctatgcggtgcggccgggccagcatgtgcgtccgcgcgggcaggattttgtcgagggcgcgccggtgctgatggccggcacagtagtcgacttttcgcgactgaccgttgccgccggcatgaaccatgcgacgctcgacgttcggcgcaagcctctcgtcgcgctgcttgcgaccggcgacgaactggtgacgccgggccagcagccgggcccctcgcagatcattgcttccagcacgttcggcattgcggcactcgcgcgcaaggccggcgccgaggtgctcgatctcggcatcgtcgccgatgacaaggcggcgatcacggctgccgtcgagcgagcaagaaaagccaaggtggacgtgatcgttgcgctgggcggcgcatccgtcggagaccacgatctcgtgcaggcgaccttgctcgatgcgggcatgaagctcgatttctggcggatcgccatgcgcccgggaaagccgctgatggtcggcagtttcggcgatacgcatgtgctcggcctgccaggcaacccggtttccagcctcgtctgcggcctgctgtttctcgagccgctgatccgcaagctcgcgtctctgcctccggtcaagcggagcgccatggcggaagccgccgtcggcatgaaggcgaacgaccagcggcaggattacgtcagggcaagagcggtgtgttcgccatctggcgccttgaaggtcgagccattcggcaagcaggattcgtcgatgatgaagatcttcgcggaatcagactgcctgatcataaggccgccgcatgcgccggagctcgcggccggaggggcatgcgaggttatgttgatccgtccggagctgctcgtctgaacgctcggtcggaggccaccgcttaccgatcttggttatcgcggtgacttgtgcgggtaccgcgcttgtttcacactacacgcatcgtcactcatagcctggaagcctgatcatgaccaccgcgccagttcgcgatacgaaagccatgctgcgcggcatgacgccaagccttgacgctgcggactatgtgttctgcacgaccgaagacgagcagctcgcgatgttggctgcaccaatctcgctcggctggtttcgcgaatccgagggcgtgtccttgatactcgcacatggcgacgctctgcgactgggcttcgacaccacactcaccatgcgacggatcacgctcaccgtgttttcgtcacttgaaggtgtcgggctaacggcggccgtcgctaccgcgctcgccaatcacaacatctcctgcaacatggtggctgcctatcatcacgaccacgtcttcgtgccaacggcggacgcggaagaggccatgagggttctgttggacctgcaggtggcggcaggctgatactggagcgactggaattggctagccgtcagaaactggccaagctgaacacgccggcccgcacttcgcctccgtcgctgcaaagaccgaaatcggacacggaatactcggcgatgcagtgcagcctctgcgttggcagcggcacgcgatagggatcgccgatcaggacgtcgatgccgccggcacggcaggtttcgagaaaggccagcgcgcgctttgccagtgcttcgtcatagaaaagatcaccggccaaaacgatatcgaccgcaggtggcggaccgtcgaggagatcggcatggataagatcgatcgcgacgccgttggcgctcgcattgaggcgggcggcggcgatggcattgccgtcgatgtcggttgctaccacggatgtcgcgcctgccttggcggcggcgatcgcgacgaggccggacccggtgcccagatcgagaacgcggcggccgcgcacaagatgcggattttcggcgatataacgcgccagcaccgcgccgccgccccagccatacgcccagtaaggcgccggcgcctcggggttggcgccaccgaggcgtgacagccggcttccggaatgcgctgtgtagagctggatatcttcgagacccggcaccggcagaagccggaggttcctggcgatgaaggcgctggcgtcgaaggacgatgtgcgcctttgcggctggggaccatcttcagcggaaacggatgtcatgcgttcggttttatcatgcatggcgccgcccggtccggatcggcaatcgcgaaaaccgtgtttcgcgattgctagacatcaaagacggcaagacgtggctgccagctcgaacaacgccccgataccgggaccattggaacgaccggcggcgcatgcgatcctcgccgtcgcgattataggcctcagcccttcttcttggagaatttcggcttcgggccgttgccgtcgaacttcggcttgccttcgtatttcggcttaccctcgaacttgggcttgccttcgaacttgggcttgccgggcttgctccacggcttgctgtcgcgttcgccagccggtgccgcatcgctgcgcggtcccttcttgaagccaccgtcgcgcggacggtcgtcatagctcttcttggcggcgtagggcttcggacccgatttgttgaaatccggcttgtcgtactcctggcgaccgaattccggcatgccgggcagacggctgacgcggatgccgcgctccatcgtcttgttcggaccggttgccgcgaggaaggcatcggcgctgccggcggcgatctcgacgaaggtctcttccgactgcatcttgatggcgccgatctcgcgcttggtcaggttgccgttgcggcagatcatcgggatcagccaacgcggctcggcgttctgcttgcggccgacagacaacgagaaccagacgctggggccgaaatcgtcgcgcgggccgcgtgggcctgtgtcgcgcgggccatcggcattgtcgcgcggcttgcgcgggccggcctgcaggctgatctccatcagatcctccggcgccgattgcttggcgcgatagaggttgacgaaagcgttggcgagcttttcggcgccatgcgcgtcgagcaggcgcttgacgatgtcctgctcttcctcgcgcggcgcttcctcgaagatcggatcggcgagcagacgttcctcgtcgcgggcgatcacttcctcggccgacggcggcagcgcccaggtggcggcgatgccggcattgtcgagcagacgctcggccttgcggcgggcattcagcggcacgatcagcgcgctgacacccttgcggccggcgcggccggtgcggcccgagcggtgcagcagggtttccggattggtcggcaggtcggcatggatgacgagatcgaggcccggcaggtcgatgccgcgggcggcgacgtcggtggcgatgcagacgcgggcgcggccatcgcgcattgcctgcagcgcgtggctgcgctcgttctgcgtcagttctcccgagagcgcgacgacgtcgaaattgcggttatggaagcgggcggtcagatggttgacggcggcgcgggtcgagcagaagacgatggcgttggtcgcctcgtagtatcgcaggacgttgatgatggcgttttcgcggtcgctcggggcgacggccagcgcgcgatattcgatatcgacgtgctgcttttcttccgtcgtggtggcgatgcgcacggcgttcttctggtagctcttggcgagcttggcgatcgcggccggcacggtcgccgagaacatcagcgtgcgccgatcgtccggcgacgcatcgagaatgaattcgaggtcttcgcggaagcccaggtcgagcatctcgtcggcttcgtcgagcacgacggccttcagatcggacatgtcgagcgcgcggcggcggatgtgatcacagagacggccgggcgtgccgacgacgatgtgggcgccacgctcgagcgcacggcgctcgctgcggatatccatgccgccgacgcaactgacgatgacggcgccggtcagctcatagagccattccagctcgcgcttgacctgcagcgcaagctcgcgggtcggggcgatgacgagcgccagcggggttgcagccggctcgaagcgatcgtcgtcgccaagcagggtcggcgccatggcgaggccgaaggcaaccgtcttgccggagccggtctgcgccgacaccagcgcgtcggatgcggcaagggccggatcgagcatggattgctgaacgggggtgagctcggagtaaccgcgcttcgccaacgccttgccgatcgccggaacgacgccgcttatctctgtcattttgtctgtctttcggaataatcgggcgcacggtgcgccgtccggaacttgccggttgaaaagttgggctgttcctactgcgtcacacgacaaatgtcaaagcggatgtccgcgccacagaaagacatcgatgctttcggcgcggccccggatcctggcggagaccgggcctccgagatcaccctgctggctgggcgctgcccccgccctcgccgcgctcatcaacgcggcgctgagcgcgagctcgaaaccgcgacttgccgccacttccatgaggcggctcgcgacgttgacggtatcgccggtcgcggtgatctgctggcgcgcaccggtgccaagacgcgacgcaacgacggggccgcagtgggcgccgatcttgaagccgatcttgcgcccggagagccccggatcggctgaaagccacgccctcaggcggttaccaagcccgactgcgcaggcagccgcacgcaaggcgtcgtcgtcggctggacgcgggagcccgaagaggatcatcgcgccatcacccatgaagctggtgatcgcgccgccatgggtgcgcgcctcgtcatcgacgaactcgaagaagccgctcagcacctgttgcacccgcgccgcgccgatcgcctcgctcaatccggtgaagccagacaggtcgacgaacaccgccgaggcttcctgacgcaccgggcgcgacagaaaggatggatcacgcgcaagccattcgccgaggccgggcgcctcgattcgctggagcagatcgctttgcgccgcgaaatgcgtggcgcggcggcgatccagccacagttccatcgcaccgaacaacaacaccggcggtagcgtcgcggcgatcggcagcgcggcgctgaaccagtagccatgcgaaaaggcgacgacgttgaacaccagccacgccagcacaacggccgcgatggcgctatatgccgcggcgctgcgccgccagccgagcaagctgataacgagtaccggcagcatgatgccgagcagcgcgtcgaaggagcgcacattgccgtcacgcacgatgttgtcgcctgagatcaaccgggtgatggccgttgacatcacctcgacgccgggcagaaccggatcgaacggcgtcggaaagacatcgccgccgccagtcacggtcgagccgatcacgaccaccctgccctcgatcgcctcggcatcgatcccgccggccagcgcatcggctgcgctgaaagtggggatcgttccgcgcgggccgtagaaggtcagcggcaggcgctgcccgacatcggtgggaagacgtctgtcgcccaaagtcagggtcgcgggcgtgaacgccggattgacgccaagcgccagcgatgcgacgcgtaacggaaacgaggcatccacccgctgcgcgccgcgcgagatcagcggaacatagcgcggcgtaccaccctggtcggtcgacacgttgacgacgccgatggcggcggaatcggcgaagcgggcgatcggcagcatcatccgatccgctacgggaatggtcgccagcgggtcttcggcgctcgatgtcaccgactggacactcgagggaaagacaccggccgcggcgacgacgctcggcacgctcttcagcgcatcggccagcgcccgatcaccctcctcggggcccggatcgacgagcagcaggtcaagcgcgatgaccttcggcttgagcgcgccgatggtttccaccaggcgcgcaagtgttgccctgctcaaggggtatccattggcactcgccgtccggtcatcgatcgcgacgatactgacgacggagggcgcgctgcccggcccgagaagatggctcctgaggtcggccagcgatgcttccatgcggtcgagaaagccggcattgccctgcatgtggagatagccgagcgcgccggcccaaagggcggccgcgatcatcgatatcgtcatcagaagccgtctggcctgcatgggcaactactggcccaaccgcgcgagaagcgccgccgcgcgcgcctgcggccagcgccgtacggtgagcgcagcgctgccgctcgacacgtccacgccctcgcccggcgccagcacgaccgtcggccttgccgacggtctgccgacggcgacacggccgcgcaccacgaagaccgaggtggtgccgttcttgacgtcgacggcccagcgcgtaccgcgcacggcggcgatcgcctgtggcgtcaccacctggaagccattgccgcgcctggcgcgatcgacatcgacgagcaccgccttttcgcgcagcgacaccgaatcggggcgaccgtcgccattgctgtcgacaagcctgaagcgcgcgccaccttcggcggtgacagtcacaccatcggcgcagcgcatgatctggcgcgacgagcccgcgacgcgctcgagcgcgcagccagccgactgagccggtgcgatatccgcccagagcaggatcgtcgcggcgatggccgcgaccagacaagagcgaccgcccgataatgtctccatgatatcccccagtggcgacttttgctttccgactgattgatgcagtttaactccgcctcgcccgacaccgcaatgcgccacaggtggccagatagtcgatgctaccgcctgtttgatcataacgtttgcggcgcaggaccgatgtagcgggcacgcgggcggatcatatttccgctggtcacctgttcgatggcatgcgcgagccagccggcagtgcgcgcgagagcgaagatgacaagcggggcatcgtcggggaggtcgaagtgcccggccagggcagccagcgcgaaatcgatattcgcaggctcgcccagcaaatccgcgccaagagcggcaatttccaagtagagcttcggcatctcgaacgaatgcatgatcgccgccgcgcggggatcgccttccggatagagctgatgaccaaaggcccgcaccacgccttccgtcgccaacatcattcggatcgcctcgcgcgcgcccacctctcgcgacaactccatcagtcgcacggcaccctgccaggcgccgccgtggcgagggccggtcagcgttgaaagacccgacaaggtcgcggcagccagtgaagcgcccgacgacgcggtgacgcgtgcagcgaatgccgagacgttcaactcgtgttcggcggccagcacaagtgcccgcccgatcggctccgccgcctccggccgagcccagctgcgtgcgaggcgctcgtgcagcggcaagtcgagcatttggctcggggcgagcgccgcggctaccgtgacaagcacctgaccagcttcggacttcaacgcggacggcgcgcggcccaacgccggcaggtccgcagcagctcgcctggcaagcaatgcgaaagcgccagctatccgtgacggctcgcctggagatacgtcgattggcgggcatatggccgccgaactctcccacaacaaggccgacacctgctcgaacgttgcccgctcggacaaaccgaccgcatcgtgacctcgatagtagagccggccatcggtgatcgtcgatatcgcggtcggcaggaccggctcgccccaatcgatcgtctcggcggcaatggtttccgcctttcgtctgccggcatggcgcttggccagacgcgcgacgtcctcggaatgataaaggcttcgacggctatcagcctcatccgggcgcgcgcgaatccgaccgcggctgacattggcgtagagcgtctgcggcttggtgccgagccgttccaaagcctgctccgccgtcagccacgtcatgagaccctcttacattgatctatttcatcaagattgacgtcaatctatctaggtccgatctttcctggcgtaaaggagaaacgcaatgaacaatggcttggaagacgtgattgcagcggagacccgactttccgatgtggatggtgaacgcggacgcctggtgatacgcggcgtctcgctggacgatctcgttcccggcgggacctatgagagtgtcgcgacgctgctgctcgacggcctgatggaagatccggtcgacgcgacgacattgcggccgctgctcgccagcgcgaggatcgacgtgtattcatacgtcacacagctggacgaaacacttctggcgctgccgcctgtcgatgcgatgcgtgccatgatcgcgcgcctggccgacggtcaggacttggatacggctctgcacttgatggcagctcccgccgtgttcctgcccgccatcctcaggctgcaggccggccagcggccggtggctccagatgcggcgctgtcgcagtcagcggacatattgcggatgacgaccgaccagatgccgagcgcggagcagatggcggcgttggacgcctatctggtgaccatctcggaccatggactgaacgcctcgacctttgcctcgcgcgtcgtcgcctcgacccaggcgggtctgacatcctcggtactggccgccatcggtgcgttgaaaggacctcttcacggcggcgcgcccggcccggtgctcgacatgctggatgcgattgaaacagggggcgacgcccaggcttggctgacggtggcgctcgatcgtggagacaggctgatggggttcgggcaccgaatctatcgcgttcgcgatccgagagccgatgcgctgaagaacgcccttgcgcccctggttcgcgcggatcaggtcaatcgtgaacgcattgcgctcgccggggcggtcgagcgggccgcgcttgccctcctcaaggcgcgaaagccggatcggccgctcgacgtcaatgtcgagttctacacggcgctgcttctcgaggcactcggttttccgcggcaggcatttaccggcgtcttcgccatcgggcgcacgatcggctggatcgcccatgcccgcgagcaggcactcaacggccgattgatccgtccccgctcgatctacaccggccctctaccaaaggtcgcataatccgaaaaactcaacactaatagagatttagcgaatatttactcaaatcccatagattcgcccggcgtgcggtttggcacgcttggcatatcggggtttgtccaatggtcggatttctatcaagcatcggctcttccagcagcgcggtgctggacgcgctaaacaagtcgcaggcaatcatcgaattcgacctcaacggaaagattctgacggccaacgagaatttctgcaaggcggtcggctatgagctcggcgagatcgtcggcaagcatcacaggatgttcgtcgatccgtccgaggcgaactcgaaggagtatgctgatttctgggctcgtctcggcgaaggcaagttcgaccagcgccagtacaggcgcatcgccaagggcggccgcgagatctggatcgaggcgacgtacaatccgatctatcgcggcagcaagccctacaaggtgatgaagttcgcgaccgatatcaccgccgccaagaagcaggcagccgaggacaagggcaagctcgaggcgctgtcgcgcgcgcaggctgtgatcgagttcacgcctgaaggcaacatcatcaccgccaacgagaactttctctcgacgctcggctattcactcgccgagatcgtcggcaagcatcatgcgatgttctgcgaagacgattacagccgtagtccggcctacaaggccttctgggcaaacctcgccgccggcaagttcgcggccgaccaattcaagcggatcggcaagggcgggcgcgagatctatatccaggcttcctacaatccgatcctcgatgcctccggccgcgtcttcaaggtcgtgaagttcgcgaccgatgtgaccgagcggatgaaggtcgtcaacgatctcggcgccgggcttgcccgcctctccgagtgcaatatccggcagacgatcgacgagccattcgtcggcgaattcgagacgttgcgccgcgatttcaacacctcgatcggcgcgttccaggcgacgctggtgaaggtgctgcagcagaccaacgcgctgaacggcaacagccaggaaatgcgcgacgccgccgaacagctctcggcgcggaccagggaacaggcggtctcgctggaagaaacctctgcggcgcttgaaacggtgacggcgacggtcaagtcctcgaccgagaacacgcaggcgacgcgcaagctggtgcagagcgcgcgcgcctctgcctcgacgtccgccgccgtggtgcgcgagacgatcaccgccatgcagcggatcgcctcggcctcgaaggagatcggccagatcatcggcgtcatcgacgagatcgccttccagaccaaccttctggcgctcaatgccggggtcgaggcggcgcgtgcgggcgaagccggcaagggtttcgccgtcgttgcccaggaagtgcgcgaactggcgcagcgctcggccaaggccgccaaggagatcaagggcctgatcgagaattccggcaaggaagtaaatgaaggcgttcgtctcgtcgacgcgaccggcacggcgctgaacgagatcgagaccttcgtcgaatcgatcgacaccaacatgaccgcgctggcgaccgccgccgccgagcaatcgaccggcctttcggagatcaacaacgcggtctcgcagatcgaccggatgacgcagcagaacgccggcatggtggaacgcacgaccggcatcagctcggaactcgcatcgggtgcggcgttgctcgccgagctggtcaaccacttcaagctcaatcggcgcggagcgatccgcgatcaggggacgcaatccggagctcccgcgcggggacagcgcgcggcctgaggcggcgaggcgcagatttgggaatgacggccgaagacacctctccgccctcatttctgtgctcgtcacagaaatccagtcagcccaagtccttgggctggaaagagtcttttcgccgcgcggacgcgcggcggctggattcccgccacaagggcgagaatgaggggaatttttagcacccggtgctgcccgcatcagcgtcagccaactcgcttacatccctatccccaaaagcaaaaaggccgctctcgaaagcggccttcccaatcgtcttgcgactatgtcttaaaccaaccggctctgctcggtcgccgcttcgatgaagctcttgaacagcgggtgcggttcgagcgggcgggacttcagttcggggtggtactggacgccgatgaaccaggggtgatccggatattcgacggtctccggcagcacgccatccggcgacatgccggagaagacgaggccgcagttttccaggcggtccttgtagtcgatgttgacttcgtagcggtggcggtggcgctcggagatgtcggtcgagccgtagatctcggcgatcttggtgtccttcttgagcgcggccttgtaggcgccgaggcgcatggtgccgccgaggtcgccggccgcgttgcgcttctgcaactcgttgcccttgacccattcggtcatcaggccgaccaccggctcgtcggtcttgccgaactcggtcgacgaggccttttcgatgccggccagatgacgggccgcttcgacgaccgccatctgcatgccgaagcagatgccgaaatagggaacgttgcgttcgcgagcaaactgggcggcgaggatcttgccttccgagccacgctcgccgaagccgccaggcaccagaatgccgtggaccttttcgaggtagggcgccgggtcttccttttcgaagacttccgattcgatccactcgagattgaccttcacacggttggcgatgccgccatggtgcagcgcttcgatcagcgacttgtaggcgtccttgaggccggtgtacttgccgacgatcgcgatcgtgacctcgccctcgggcgtgcggatgcgattgcagacctcttcccaggaatcgagacgcggcttgggcgccggttcgatgccgaaggccgccagaacttcgttgtcgaggccttccttgtggtaggcgatcggcacgtcgtagatgttggcgacgtcgagcgcctggatgacggcgctctcgcggacgttacagaacagcgagagcttgcggcgctcggcttccgggatttcgcgatcggcacgaacgagcaggatgtcggggtgaatgccgagcgcctgcagttccttgacggagtgctgggtcggcttggtcttcagctcgccggctgccgggatatagggcatcagcgtcaggtgaacataaaccgccgtgccgcgcggcaggtcgttgccgagctggcggatggcttccatgaagggcatcgcttcgatatcgccgacggtgccgccgatttcgcagatgacgaaatcatactcgtcattgccctcgatcacgaaatccttgatctcgttggtgacgtgcgggatcacctgaacggtcgcgccgagatagtcgccgcggcgttccttgtcgatgatgttcttgtagatgcggccggtggtgatgttgtcggtcttggaggccgagcggccggtgaagcgctcgtagtggccgagatcgagatcggtttccgcgccatcgtcggtgacgaagacttcgccgtgctgggtcgggctcatggtgcccggatccacgttcaaataggggtcgagtttgcgcagccgcacccggtaaccacgggcctgcagcaacgctccgagagcggcggccgcaattcctttaccgagagaggaaaccacgccgccagtgatgaatacgtatcgcgccatgggagctaccgcttaccttttcaaaaacgattccaccagccctaaaattcatgtcctgaattttagggctctaatttaacagcattcttcccgcgcttgccgcgcgatcgctgtcggtgacttcaagacaaaagaaaaccggcagaccctggggcctgccggcggtttatgcgttgtgtggcttactgcccgctcggagcagtcgccggggccggagcggcaggcgtggtggcctgcggtgctgccggagcggtttcagtcgctgccggggctggcgtcgtcgcggcgggagccggtgcggtggctgcaggagcagccggagcggtcgcggcaggagcctgagcggccggagcagcaggtgcgtcgccgccggtcggaacgccgttgccggcgggagccgcgggtgcagccggagcggcggcgccgttctgctgaccgccaagcgaatcgagaatgccgttgccctgcccgctcgttgccggaatgcggttcaggatatccgtcggacggctttcgtagcggttcaagacgccgaggccgagcgaggtgatgaagaagagtgctgcgaggatcgcggtcgtgcgggtcagcgcattggccgtgccgcgcgccgacatgaagcccgaaccgccgccgataccgaggccaccgccttcggagcgctggataagcacaacgccgacaagcgccagcacgatcatgagatgaatgacaatcaatacggtctgcatgggtccagtcctgccggcgcgaagcgggcataaagtaaaattctggcgctctttacatgaggtgatccgctattccaagcccttcggcccggaatatacacgcatctcaagagagcaacgcctcgtatgcgccgtagatggcgaggaaatcggttgctttcaagctcgcaccgccgatcagcgcgccgtcgacattggcgacgcccatcagttcccgggcgttgccgggcttgaccgagcctccatagaggatgcggaacttgcggccgttgtcgccgaagcgtgcgaccagctcggcgcgcatgaaggcatgcgccttctcgacgtcctcgacggttggcgtcacaccggtaccaatcgcccagacgggctcgtaggcgatcacggtggtttcgggcgtggcgttctccggcacggaggccgacagctgccgcttgatgatatccagcgtctggcccgcctggcgctcggcagcggtctcgccgatgcagacgatcgcagtgagatcggcggcggcggcggcttccgccttggcgcgcaccagatggtccgtctctgcgtgatcggtacgacgttcggaatggccgacgatgacataggtgccgaagcaatcggcgatcatttcggccgagatatcgccggtatgggcgccttcggggttctggtggcaatcctgcgcgccgatggcgagcgggctatcggtgcagagcgccgtcgcgacgtagagcaacgtcgccggcgggcaaatcagcgcttccaccttgttggaaagaggaccctgcacgcccgacgcaatcgccttgatctgatccagcgaggcacgcgtgccgttcattttccagtttcccgccacaagcgggcgcacgtcaggtgtcatgccggccttccccatttctcggtcaggacggccttagcaaaagcatgcggcaatgaaaaggtttcggacgcttacgtaagggaaattgcggcgttttgcggcgcaaatgcttaaaatttgtcggccgcgttgcctaaactatggctggcccctcaatttttggaggccaatatccagttcagcgtccggcgccagtcgatcatgcggatcggcgtgccgtgatttcccgtctggtacagggtgaaatgcgtcggatagcccgatttgatcagcgtttcgaagagcacctgctggtcggcggcggcgtaggtcggatcgcggctgccgtgggcgaaccagagcggccgcctggccttgtagaaggcgctcttcgcaaaatcgggatcggcgacgccgctcatgatgaccattcccttgagccgcttgaccgtttcggcatcacgcgtcgcaccccagcagatctggctccccatggacgcgcaggtaaggatgatcggccggcccggcgcctgggcgctggcatagcggatcaggccggcgacggcggtcacgccatcgctgtcgaaggtcctgaccgagggcgcgtaatagacgccaccattgccggcgacgaggtttttcagccggttgaaattgccgccgaaggtgtaatcgttgacgccgaggcggcggtcgccgtttcggccgtggacgaagatgaccgtaaaggcggcgccagcgctcggccctaccctcgcaacgtcgagcttgacgccgtcgagcgacagcgtctcgttgttctgcagcttgcggatgccgagcgagacgtatttctgctgcgtgcgtttttccgggatctggtcgcgaccgttgatgtcgcgcatctcgtcgtaatcgatgacatcgaaggcgccgtcattgccggtctgaagcgtcgtctgcgtcgaaaacaggtcgtccttgaacggcggcaaggtgtcggctgcgctgatatcggcgtatgcgaacatgaaaaaggccgcaattgctgtgatagttatgcaatgacttgtggacattcgcatgcgcaaggttccctgaggcgtctggccgcttgccattcggcgacccaggacgcaaatcatttcttgaagaaagtccgcccgacgaggcggcgtcgcgtatcgaggtgctttctggcagactctgcctgattcgcaaacgtgacatgaattgcggtgattttgggtcgggctcaagcgcaagcggccagcccacgacaagatgaagatctgaacggctccatggacgatagcaacgacctcttttccggaatgcccctgaccaagaagcaggaggatgcgccgcagccggccaagacggcacccgctgccgctccggctgcgccgagcgctgccgccagtgccgcgccacggcaggcgccgccggcgagctcgacgtccgaggactacggcgcctcgtcgatccgcgttctggaaggtctcgagccggtccgcatgcggccgggcatgtatatcggcggcaccgacgaaaaggcccttcaccacctcttcgcggaagtcatcgacaactcgatggacgaagcggtcgccggccacgccaatttcatcgaagtgcatctcgacgcgatgggcttcctgaccgtcagcgacaacgggcgcggtattccggttgagaaccacccgcaggttcctggcaagtcgacgctcgaagtcatcatgaccaagctgcatgccggcggcaagttcgacggcaaggcctacgagacatcgggcggtctgcacggcgtcggcgtctccgtcgtcaacgcgctgtcggatgttctcgaagtcgaggtcgcgcgcaatcgcaagctctatcgccagcgcttttcgcgcggcattccgcagggtggccttgaggaactgggcgacgttcacaaccgccgtggtacgcgcgtgcgcttccatccggacccgcagatcttcggcgatcacgccaagttcgatgccggccgcgtcttccgcatggcgcgctcgaaggcctatctgttcggcggcgtcgagatccgctggagctgcgatcctggtgtcgtcgcagaaggcggcgagatccccgacaaggcggtcttccacttccccggcggcctgaaggattatctgcaggcgacgatgggcaaggagttcaccgtcacccgcgagatcttcgccggcaagacggaaaaaaccagcggccatggctcgctcgaatgggcgatcacctggtacggcggcgacccgcaggttcactcctactgcaacaccattccgacgcccgaaggcggcacccacgaggccggcctgcgcatcgcgctgaccaagggcctcaaggcctatggcgagctgacgcagaacaagcgcgccgcgcaaatcaccaccgatgacgtgatgatctcggccgtcggcatgctctcggtcttcatccgcgagccggaattcgtcggccagacgaaggacaagcttgccacggtcgaagcccagcgcatcgttgaaaacgcgctgcgcgatcccttcgaccactacctcgccgacaatccgaacgagacagccaagctgctcgactgggtgatcgagcgcgccgaggagcgcctgcgccgccgcaaggaaaaggaagtcaaccgcaagaccgccgtgcgcaagctgcgcctgcccggcaagcttgccgattgctcgcagaacaccgcccagggcgccgaactcttcatcgtcgaaggggattcggccggtggctccgccaagcaggcgcgcaaccgcgccaatcaggcgatcctgccgctgcgcggcaagatcctgaacgtcgccagcgccggtcgcgaaaagcttggcgccaaccagcagctctccgacctcgttcaggcgcttggctgcggcacgcgctcgaagtaccgcgaggaagaccttcgctacgagcgcatcatcgtcatgaccgatgccgacgtcgacggcgcgcatatcgcctcgctgctcatcaccttcttctatcaggagatgcccgagctcgttcgcggcggtcacctgttcctcgccgttccgccgctctacaagatcacgcagggcgcgaaatcggcctatgcgcgtgacgaccgtcaccgtgccgagctgatggagacggagttcaagggcaagacgaaggtcgagatcagccgcttcaaaggtctcggcgaaatgctgccggcgcagctcaaggaaaccaccatggacccaagcaagcgcaccatgctgcgcgtgctgatcgacgaggtggatttcgagggcacgcgcacggcggtcgacgatctcatgggcacgaagccggaagcccgcttccggttcatccaagatcgcgccgcgttcgcggaaaacctcgacatctgacgccgaggtccgacggaagatcaggctcggccgagcctgatttcgatcacggtctttaccgaattggcgaggaagcagagctcgtgcgcctgatggtgcatctgctcctcgagttcacggcttgggacttcgtcggtgtaaccgaccttcggccgcagctcgacgcggctgaccatcattcgtccgtcgaccttttccatcacgccgagagcatcatcgacatagctgtcgatgccgatgcgctttttcgacgcgatccaaagatagaacagcatgtggcagctggagagcgccgccacataggcttcctccggatcgacattctccgccaccgcatagggcaaaggcacattgtgaggagatgcggaagccggcaccgtgatgccgccgtcgaaggaccagctgtggccgcggctgtagcgcccgtcgataaagttgtcctcaccgcgctgccacgccacctgtgccgaaaacgtcgtcatgcctcttctccttcttgggtcgcagcgccgccactatcagctccaggcatacttgtctcggctttcgctcccggcgctcggcgcgcacacgagatcacgatgtcgtcagcattcggcgctcgcgctgtatgaaaaccatatcgaaggaattctgtcttaatgattgcgctatgtgagattatgaggtctgcgggacgaccgatcgacggacgacgggggcgttgtccggcataaatcggcgatggagcttgcgtgcagaggacgcatggcccatatcggtaggtgaaataggggaaaaggacgacgtgagccttccaaacaacaacatgcagcgtgagtcgagatggattggcccatcgtctcatgcacgtacgccgctcattccttcgatctccgcggcgcgctggcttttgatgcttgtcgtggccgctggcgtttattttttctacggcttcctcgtgccggtgctggccgctctggtcatcggatttgcaagctggccgctctatcgcaagctgctgcagaaggtcggcggcaacacgacgatcgccgcaaccatcgcgctgatactgatcatcacctttctcatcacgccgatagtgcttgccgtcacctacacgacgggcgaagtgcgcgaatgggtcgcctggctgatccacgcgaaccgcgccggcgcgcccacgccgacatggatcgcagcacttccgttcgtcggtccgaacctcgacgagatgtgggtcaagtatatcggcacgccgggcgccatgggcgaactgatccaggcggtcagcggcgcccatattgcaaacatctaccgcgccgtgctcgcggccggcggcggtgccttccatctgcttctgacgctgctgttcatgctgatcgcgctgttcttcgtctatcgtgacggcgcggcgttctcgcgccagatcgacatgctcggcgagcgtatcctgcccaaccgctgggagcgaatctcgcgcgtggtcccggccacgatcagctcgaccgtcatgggcatgacgctgatcgccattggcgaaggcatcgtgctcggcgtcgcctattggatggccggagtgccctcgcccgtgacgctcggcgtcatcaccggcatcatggcattgatccccggcggcgcgccgctgtcgttcacgctggtctcgatctaccttgtcgccagcggctcgcccctggccggcgtcgtcctgttcgtctggggtaccgtcgaactcttcatcgtcgacaagacactgcgccccaaactggtcggcggcccgatcaagctccccttcctgccaaccttcttcgggctgatcggcggcgtgaagacgttgggcttcctcggggtgttcatcggcccggtgctgatggcgcttctggttgcgatctggcgcgaatggatgcacgaggtccgcacggccgaaaagccggatatcggccctcaggtgctgatcgacgaacaggcgccgccgccgcccagggtcgccgaaggctgatcagggcgccgcctttccggatagcaaacattgttccgcatggatgccggaaagcggccttcatttggctgaaattgctgcgtctaaggggagcggttcaatatcgaaagcgcccccatgcaagccgtcctcatcgccatgaccatcctcggatgcaacgacgcggtcacgcaatgcaattacgttgcgacggtcgagaagcgctgggaaacggtggcgatgtgcgacggcgattccgagcggcaactgacgcgttattccaacatcaactacccgacggtcatcgccgtctgcgagcccccgcggccgccggaaccgagtgtcgtcgccgcagcgcctgcgcccgcatccgccgtggtcgaggaaaggtcgcagaccggtatttccggcctggggtccagaatggcggcagaggtacgcgcatacctgccctccggccattccatgaaatccgcgctcgcaacgcccgtgcatttcctatcaggaagctattcctgggtcatcaggcgcttgagcaatcagagctagactagctaggccgcggccagtgccgtcatatgggcatatccgcgtgcggactgtcgctgctcggcgacatgcagcttctcgaccatctccagcaactcctgcacggcgccatgggtggcgttgcggcctctgaagctctgcagcagccggccgcagacattcgcaagcatggtgcccgatgtggatttcgacgcctcgcgccacagcaaggtggcttcgacgaagatcacgctgatgtcgcgggcgagaccggccgtctcgtaaagcgcgcgcacggcgtgcatgcggccggtcgccaggatcgagcgcacccgccgctcgtcgcagccggtcagattaacgatggcgccggcgaagaactcgaccttgccggagcacagcgcgtgcatgaggaaagacggcgtgaggcgtccgctgacacgcagatgctcgaccaggtcggcgacctcgcccggcgtgatttcaccggcaagggcgacgatcgcggtttcggtcgcctcgcgcgcaacacgctgaagacggccggcgccgatcgccgcctgcgccagcggcagattgatcagggcgtcgctcacatgctgcgtcagcaactggcgggcatcggccggcaggtcgggacggtcgagcaggaggttgcgcacctcgcagtcgtcgcccagtcgctcggcaatgcgcttcagagcctgcggcgcgatctcggcgccttcgttttcgagcagacacagaacatcttcctcgccgccgatctccgccagggcggcggaaaccgaacgcgatatgctggagcgtgcggcaatcagcatgcgcgtgacggcgctgccgcgcgcggcaagatcgacgagatccgtgtccgatagtagcggcgagcaggtgatggcatggcaggcgatctccgcctggtcaccggccagggacaagacgatggcgcgcggcgcatccggcgaccacgcgatggcttccgccatggcgagccgaaccttcggtgacgggtcgtcgagcaggaaggtcatggccatttccgcggccttgcgctcttcccgcgacatttccgactgcaggtaggcgcggccgagcgcgcttgccgccctcgcccggtctccggtcttggcagtctcaacccaacgaagaaatgcctctacgatcactgcgaaccccgatcctcaagtgcgattctctcacaccccaagtgttgaggatgacggtagcggcaaaaagtttatgattggttcaccatatactttaacccttcttcagggctgcggggcttttcaggccttgggccggaagagctcgaatacatcgctgctctcgctgtaatccatgtagcccagacgggcgacgggtctcgccagacccatgtcgatacggccgtcgcgcaggatcgcttcatcgatatggataccgacgacctgcccgaagatcatgacgctgtccgacggctcgccgctgagtgacttcggctcgatgatctcggttaccttgcattccaggaccgcgaaagcttcggccacatagggagcatcgacgagctcccccttcttcggcgtcagtccggacaatgcaaactcgtcgacgtcataggcgacggcggccgaggacatgttcatcttgtcgatcaggttacggctgacgaagttgcaggtgaattcgccggtttcgctggcgtttcgatagctgtccttgcgaccgctcgacgagaacatgaccagcttcggacggtccgatatggcgttgaagaacgaataaggcgccaggttcagcgtgccgtccccgcccttactgccgatccagccgatcggccttggcgacacgatcgccttgaagggatcgtgcgcaaggccatgccggttctgatccgtcgtgtagaacatcaaccttccccgccgacccaggtgaccgtctcggaaagctcggggcgcgggcgctcgacgggcgggaacgtcgtcgagcccatgtggatgaagccggcgaccttctcgccgggctcgacgcccagcagcggataggcgcgttcgtcataggcgaaccactcggtcagccagttggcgacccagccatgggcattggccgcgaagatcatgttgaggcagacggcgccggccgacatcagctgctcccattccgggatcttgacgtgcgggccggccttgctgacgaccgcgacgacgacgggcgcgcgcgtgaagcggctgcgctccacctgaatcatctcgtcggacagatcgggcttcttttccagggcaagcttcagaagctcctcgccaatgcgggtccgttcctcgccgcgatagacgatgaagcgccaaggtgccagcttgccgtgatccggcacacgcgaggcaaggcgcagtatctcctcgatctcgggcttttcggggcccggctcggacatctggaaggcgggaatggagcggcggacgccgagatagtcgatcagcttgatatcggatctcatggacaagaaactctcattttcattgcggtatcggcgatgggtcttgaatttgccatcgggttggtcttgaagtggcctctgtcatttcagttgtcaattggttcgcaaaacacatgctcggcattttgccatacgcccgctggagtgttgccgccgctctccttgccttgatgcccgtcgtcgccggcgcgcaggacgccttcaaggagttcaagcagctcgacacgaccgcgaagatgcccaagctcaatgccttcatcgcgcccggaggagcgccgcagggcacgcagctgcgtccggtcgcgctcgaggcaaagctcacggcgtcgggcgatgccgtcaaggatggcctctcctggtatgtgttcagccctgttgccgggagcgacggcaagctgccgctgatcgccagttcccagggcggttcggccgacttccagctcgcgccgggcgactatttcgtcaacgtgtcgttcggtcgtgccggcgtgacacgcaagctttcggttccagaggacggcgcgcttgaaaagcagaccatggttcttgaggccggcggtctgctgctcaacgcggtctccggatcggatgtgaagatccggcccgatcagctgagcttctcgatctattccggcgatgtacgcgaggatggcgagcgtggtctcgtgatggctgatgtgccgccgaatacggtggtaaggctcaacgccggcacctatcatgtcgtttccgaatatggcgagaccaacgcatcggtacgtgccgacatccaggtggaagcgggcaagctcacggaagcgacgatccagcacaaggcggcgcagatcaccttcaaactcgtctccgacaagggcggcgaagcgatcgcggataccgcctggtcgatcctgacggccgccggcgacgccgttggcgaaagcgtcagcgcctttccgaccatggtgcttgccgagggcgaatactccgccgtcgcgcgcaacaaggacaagatctatcagcgcgaattcaaggtcgcggcaggcaagaacatggacgtcgaagttctcatgaaggacgtgcagccggaccagggaccggcggcgacgacattgcagcagctgccgccggagcagcaaaacgaaacggaacagccgcataactcgcaagcaatgccctcgttcgaacaactccagagcggtacggcggacagtggcgtcgattccgactgaggcaatcgatatcctcatcaatgcaaagcgcccggccattgcggaccgggcgttttcgttttcagtcgaagatcagaaaagcctcaggcggccttcgccttcctggcagcagccttgcgcagcacatccggcggcgtcgcctcgtgcgtcagcgccgcgatcgcgtcgtcgagcgacatcgagctctgctcctggctgccgagacggcggatgttgaccgtgcgctcttcggcttccttcttgccgcaaacgatgatgacgggcaccttggtgaccgagtgttcgcggaccttgtagttgatcttctcgttgcggaagtcggtctcgacatggagcccggcctcgcgcaacgcctcggcaacttcctcgccgtaggcgtcggcttccgacgtgatcgtcgcgacgacgatctgcagcggcgacatccacagcggcaggtgtccggcgaagttctcgatcaggataccgaggaagcgctccatcgagccgcagatggcgcggtggatcatcaccggctgcgtcttttcggagttgctgtcgatatagaaggcgccaaagcgttccggcaggttgaagtcgacctgcgtggtgccgcactgccattcacggccaatggcgtccttcagcgtatattcgaacttcggaccgtagaacgcgccctcgcccggcaggatgccggtcttgatgcggccttcggactgttcctcgatggtcttcagcacctcggtcatcacggcttcggcgcggtcccagagagcgtcggatcccacgcgcttttcaggacgggtcgagagtttgacgacgatttccttgaagccgaagtcttcatagaccgacaggatgaggtcgttgatgcgcaggcattcggccgccatctgctcttccgtgcagaagacgtgcgcgtcgtcctgggtgaagccgcgaacgcgcatcaggccatggagcgcgccggaggcctcgtagcggtgcaccgtgccgaactcggccagacggatcggcagctcgcggtaggacttcaggccatgcttgaaaatctgcacgtgacccgggcagttcatcggcttcagcgcgaagacgcggttgtcggcttccttgtcctccggatgcgtgaaggcataggccgacttcaccgcgaacatgttttcctgataccagccccagtgaccagaggtctcccagagcgaggcatcgagaacctgcggggcgttgacctcttcataggtgccggcaaggcggcgacgcatgtaggaggtcagcgcctggaacatccgccagcccttgccgtgccagaagacgacgccggggccctcttcctggaaatggaacagatccatctcgcgccccagcttgcggtgatcgcgcttttcggcttccgccagcatgtgcaggtagttgtcgagatccgcctgctcggcccaggccgtaccgtagatgcgcgagagcatggcgttgttgctgtcgccacgccagtaggcgccggcaaccttcatcagcttgaaggccgtgccgacctggccggtggaggccatgtgcggcccgcggcagaggtcgaaccattcgccctgattgtagatcttcaggtcctgcccttccgggatcgcatcgacgagctcgaccttgtagctctcgcccttggcggcgaagacttccctggccttctcgcgcgaccagatctgcttggtgaaggcagcgttgcgcgaaatgatctccttcatcttcttttcgatcttaggaagatcgtcgagcgtgaaggggtcgttcttggcgaaatcgtaatagaagccgttctcgatcaccggaccgatcgtgacctgcgtgccgggccagagctcctgcacggcttcggccatgacgtgggcggcatcgtggcgaataagctccagcgcacgcggatcggcgcgggtgatgatctcgatcgcgccgtcgacgacgggatcggaaaggtcgcgcacggtgccgtcgatcgcgatggcgacggccttcttggcaagcgacttggaaatggattcagcgacatccttgccggttgcgccagcgtcgtagctgcgcacggaaccatcggggaatgtcagggaaacggattgggacattttagacttctccttgtccagtcccgccaacgaatgcgggtggttgcaatgatgcgtttcggatcacgaacacgccgccgcctgataccgggatttgccgtcgcagtaaaggaaaagacgggttagccgaccatttcggcgagcccgcgaacggtgttccagttgcgcagtgtgccgacgcccatacgcttcgtcgtgagcgcggagagcagtttccattcgctgggcttgccggcaaaatcgatccagagatcgccgccgatcacggcaaggcgctggttcggctgcgcatgcggccgtaacctatcgagaaccgcgtggtcgagcggctttcgcatgacgcgcaggatcacctggctgccatcgccctcgggaaacgggttggtggcggcgatcttgcgccaatcctctcccgttcgaacaaggatatcgaccggctttccgaagcgcgctttgaacgcctgctccagccgcagctcgatatcaccgatcggtgacggctgcgtttcgaagacgatattgcccgtcgaaaccagtgtgcgcggatttcgatagccgagcgacgaggccatgtcgcgcagatcagacatgacgaccctgcggcccggcgccagaacgatgctatgcaggagtgcgacgcaggtgatcacgccggcttgcggccgagcgccagataacgccacggcgtccaccaatggaaacgcgaaccgagcgtttccggaacgcggtcgagcccgctggtgccgccggggccgcaacggccgacgcgaaacagcgtcatccatccgccgctccacagaccatggcgggcgatggcctcgtaaccgtattccgagcacgttgggatatggcggcaggaattgccgatgaagccggacagcgtcagctggtagagccggataaagcccattccgaacagccggtcaggcgtcttgcggaagggtccggtgtaattgcgcgacggcacaatcggccttgcctgggttggcgcggcggcgccgccttcatcctcgtcgtcgtgatcgttcggcaagcagaactggcacatggttcaagcctccaccatctcggcacgcttggcctcgacctgtccgatcgcgtcgaccacggcgtcgaaggtcagcatcgtggaggcgtgacgggccttgtagtcgcggacgggcctcagatagcgcatgtcctcgaagcgcccggaggggccctcgccctcctctttcagcatggcgagcatgtccgaacgggcctggcgcagctcctgcgccgtcgcgccgacgacatggcgggccatgatcgaggacgaggcctgaccgagcgcgcaggccttgacgtcatgggcgaaggccgaaaccgtatcgccatccatcttcagccaaatcctgactttcgagccacaaagcttggaatgcgcctgggcgctggcatctgcctcctcaagagagccgatcagcggtatattgccggcgaattcgagaattttgctgttgtagatgtcgtccatcgggtattccgctccatatttcatgcggataggcggctgatcgtttattgtagcacaaacaaaaacacaccgtgtcgcgctggaagacttacatagcgatgccattttcctatatgtatgtcgttcgaaggccatcgaaatgcaatggcctcgtgtaagtttgaatgggaaaccgtgccggaagggccgcagattttcgccctgaaagccccggagcctgccaaaggtgcactattcccgagtgggattgccagtggctagtccgaaatacggtccgccttgcggatcaggagacagttgcagatggacgccatcgtaaagaactttccgcagaccacgccagaatccaatcgcccaacccagaaggaagccgaagaggcggtgcgcacgctgctccgctgggccggcgacgacccttcgcgcgagggactgctggatacgccggcgcgtgtcgcgaaagcgtatcgcgagctcttcgccggctacgagatggatgccggagaggtgcttggccggaccttcgaggaggtcgccggttacgacgacatggtgctggtgaaggatattccgttcttttcgcattgcgaacatcacatggttccgatcatcggcaaggcgcacgtggcctacatgcccgacggcaaggttctcggtctgtcgaagatcgcgcgcgtcgtcgaaatctacggccgccgcctgcaaacgcaggaaaccatgaccgcccagatcgcccgttcgatcgacgaaacgcttgccccgcgcggcgtcgcggtgatgatcgaggcagaacatatgtgcatggcgatgcgcggcgttcagaaacagggctcgaccacattgacgacaaccttcaccggcacatttaaaactgagccggctgaccaagcccgattcatatccatggtgcggagccgctgaccggcttcatttcagaaagccgcgatgatgccatttgccttcaatgcgccgtccgaagacaagtccgagcttgaggatgccggtgatttcacgccgcggttcgacgatcgcggcctaatcactgcgatcgtgaccgacgcccatgacggcgaattgctgatggtggcgcatatgaatgcgaaggcgctagcgctcaccatccagaccggccaggcccactatttcagccgctcgcgcggcaagctatggctgaagggcgagacttcgggcaacatccagacggtgaaggaaatccgcaccgactgcgaccaggacgcaatttggctaaaggtcgaagttgcgggccacgatgcgacctgccacactggccggcgatcctgcttctatcggaccgtcagcctggaagacggcaaaccgatgcttgcgatcgccgacgacgagcgccagttcgatccccacgaagtctacggaaaagagccgtaacgacggccagccgtctctttttgggtcaagagaggcggccatataccaattcgaaagggtggcggcgcactaatatttgcgtgggtgtcgtgccagggggaggtttgccatggtgagctggagtttgatccgtcaaggctccgaaaccgtcggttccgacgccggcatagccacgccctccgatatcaagctccccgttcccgcacagcagaaaccgaagctggcgctcgcgctgggcggcggcgctgcgcgcggctgggcgcatatcggcgtgctcagggcgctcgacgaagcgggaattgagatcggcatgatcgccggcacgtcgattggcgcgctggtcggcggctgctatcttgccggcaagctcgacgaactcgagagtttcgcccgttccttgaccatgcgccggatcgcaagcctgctcgaccttacgatcggcggcagcggcctgttcggcggcatgcggcttaccaaacgcatgcaggagcatctggaagggctgaatgtcgaggatctcgaccggccgttcgtcgcggtttcagccgaggtcaacagcggccacgaggtgtggatcgccaacggctcgctgatcacggcgctcagggcctcctatgccctgcccggcattttcgaacccgtgcgcagcaatcaccgcacgctggtcgatggcgctctcgtcaatcccgtgcccgtctcggtgtgccgtgcctacgagcagccgctggtcgtcgccgtcaacctgaactacgacatctatggccgctcggccgtggttcgccacagcgccagcctgacgccatcggaagtgcagaagcaggagcacgcgccttatgccaagctcggcatgaccggggtcatggtgcaggcattcaacatcatccaggatcgcatcgcgcgcgcgcgtctcgcgggcgacccgcccgacatctcgcttcaaccaagattgagcgatatcggcctttcggagtttcaccgcgccggcgaagccatcgagcgcggttatcaggaagccacagcgcggcttcccgagttgaggcgcatgcaggagctatttgccggctccagctgagcgagccggcgcgcccttgtcagcctgcgatataggccttgatatcctcggcttcacgctcgacctcggcgatgcgggtcttgaccacgtcaccgatcgagatgatgccggccagcttgccggcgctttcgaccggcacgtggcggaagcgacggctggtcatcagttccatcagctcgttgacggtcgtcgcctcgttgcagcggtaaaccttcgccgtcatcaccgatgccaccgaactatcaagacaggcggggccggacttggcgatcgcgtgaaccacgtcgcgctcggtgaaaatccccgcgatcttgttttccatgccgacgatgacgatggcgccgattttcttcttgctgagaatcgccgcggcctcggaaacggtggtgttcgggccggcggtgacgacatccctgcccttggcatcgagtatggctttgactgtattggacatttgaacctcctatgtcgaaagtgagacacttcagctgatcacaggcatccgcggcggtctctcctcccaacgcggatcagttcgaatggtgcacttcaacggtcaggattgcaatatatccgcttcctccgaaacagacggaagttcgggcggcgggcgatcgaacagcgaaaacagcaggaagccgaagacgaagccgccgatatgggcttcccacgcgatcggctgaccggtgtcaccgatcagtggaacgccgaccgcaatcaggagattgccggcgaaccagaagagcatgaacatgacgacggtacggctgcgcaacgcctcggcaatcgacagccggggattgaggtgggctggaaccgtcgcgcggcgttcggacggaaaggcgaagcggcaggcggcgcccatcagcgcggagaccacgccggacgcgccgatcagcaccgcggcgtcaccccagttcagcacggcttgaagcgctgccgacgcgaccgcggcaagcacccagaaaaccgtgtagcgaacccagccgatgcggcgggcgacgggggcgccgaacgccatcagccagaggccgttaaacaggatgtgctcgatacttccgtgcagcagcgaataggtgagcggcgtccagaacaattgcggcccctgctcggacagaggcgtgatgtagcgcagcgggatgaagccgaaatcgaagaacagcgcatcgacaccgctgtcggagagcagaagcgtctgcccggcgtagatcacggccaacagaccgatcgttgcgacaatggcacccggaagattgaaaatgggcgtgcgcggcggcttggcggcgggctcggtcggctgatgcggctcgttcgtatcgtccattgcattcctcgttcacttcgcgtgcactggcttacaggacgacaggtcaaaaaaaaagccgtccggcaatctaccgaacggcttgccgagcgtcccccgagaatgacttcgcgcccgagcaattcatgctgaacttccaataccggaagcaatgaaaagatactggcacggcgggggccggcagacaatcgaaacccttccttaaccttaactggccggatctggcatgaaatccgcatggcatggggcaaggtggccatgatggtcgccgtttgaaccgaaatgaaacagatcggcagtccaatgcgcctcaacaccactatccagatcttcgactactggaacaagctacgcggcagcgagatcgctcccctgcggacgcaggtggagcctcgcgacatcagacatcttctttcaagcctcttcatgctcgagacatccggcgcaggccgcgtcacctttcgtctcgccggcacgcggatctgcgacctcttcggccacgacctcggcggcagctgcctgtcggaactctgggcgcatggccacgaggacatggagaagaccgccatcggcgtcatggagcatggtattccggccctgttgaacgcaaccggatacagcaccgccggccatcgcgccgccttcgagatcattcttctgcccctgcgcgatgcagacggcgagtgcggcaagctgctcggcgccatcgcgccggccacgaccgccagctggctggaagtcgttccgctgcagtttctggcgctcgaccgcagccggctgctgcacgagcagctctacccgctggcgaacaccacgcaaggcgcgaaggaaccgcaagccgcgacaagccgcagccgctcgatcgccgatacggtgcgccgtttgatgtcgagcctgatcgacgatcccgcgaaacgagatgctccatttcggcactaccgctgagcggtaaaacaccccctcctgaacaaccttctgttaatggattgcgagtaaagcttggcgccaagctatttgtaaaagaagccctttaatgcacgctttccagcaagctcagacgcaaaaaactgcgcctcgccttgaacaaggtgcattccagcgcgtgcccatcaacatgcagggccgccttatgctggcaaattacgaggaattcgagtgcctggtcatcgatatgtcgcccggcgacatgtatgtgacctgtcagggccgcccgcgtgtgaacgagcgcgtcgtcgcctatatcgatcacctcggtcgcgtcgaaggctatgtccagacgatcgacaatcgcggcttcaccatgtcgatccacgccaccgagcgcaagcgcgagaagcttgcggcacagctgacgtggctcgccaacaagcatgagctcggcctgccggaagaccgccgccacgaccgcctcatgccgcgcgagacccagacggaaatcacgctcgaggacggcacgcagtatacgtgccggatcatggacctttcgctttcgggtgccgccgtcgacgtcgaggttcgtcctgccatcggcacgccgctgcgtctcggcaatatgcgcggccgcgtggtgcgccacttcgtcgaaggcgtggcgatcgagttcctgtcgctgcaatcccgcgacacgctgcgggaatttctctgatcatcgtcataccggcttcacgaagctgatggattgaggcgcctttcaggaggcgtccggatggcgattctttttcccgagatcgaagcttacgaccgcggccttctcgatgtcggggacggccacctgatccattgggaaagctatggcaatccgcagggccggccggcgctccatctgcatggcgggccgggttccggctcctcgccctcggcggcacgctatttcgacccttcggcctatcgcatcgtcctgttcgaccagaggaattgcggccgcagtcttcccgatgccgccgatatgggcacggatctttccgccaacacgacctgggacctcatcgaggatatcgagaagctccgtcatcaccttgcggtgacggactgggtcctgttcgggacatcctggggatccacgcttgcgctcgcctacgcgcagacccatccgacccgcgtctcggcaatggtgctcgctggcgtgacgaccacgcgccgcctggaaatcgactggctgacacagggcatggcagcgctgtttccagccgaatggcatcggctcaacgaatccctgcccggtgatatgagagccaagggtgtgatcgagggctatagggcattgctcaatgcgccggatctcgaggtgcgcctcaaggcggctcgggactggcacgattgggaggcggcctccatcttgctcgtcaatgccgacggctacccccgacgctggcgcgatccggcatacctgctgacccgcgcccggatcgtaacgcattacttcagtcatgcggcatggctcgaggaaggtgtactattacgggacgccggaaggctcgcttccatccccggcgttctcgttcagggccggcttgacctcgaagcgcccttgaccacggcgtgggaactggcgcgcgcttggccgggaagcgagcttgtcgtcgtcgaaaatgccgcccattcgcccgctcatgacggtatggcgagcgcaattatcgctgcgaccaaaaaatttctcgaaatttctcaaaaataatttttgtctcagcacgcgaaaaagcggctcaaaatgcgccaatccgcgtggaatccggcctatcggcacccagcaaagcgttgattacccaaggacgacatgatgaacgcaatattaccgaaatcgcgccacagccgagcgcgttaatcttttgccccgaaacgagccacccggcgacatggagggcttttcgcaaaagctaaaacttgaatcaaaaatggtgaagactttcttcgaattcccgtaaaattcgatattgattttagccgaattcgacgcgcttttgaatcaactaagtctttaattttgcttctgaattttgcgccgaataaaaacacgtctggcaatgtcctcctcacgaaacggggacatacaaatgacgatcacgaagttcatcaagagcggcctcgccgctgcggcaatggtcatgtcgatggcaagcgccggacaggccggctaccagaccatgacgctgctgggcaacaccagcccgccgatcggcgcctaccagttctgcaaggaaattccagaggactgcaagaacgcggccggcgaccagggcccgatggtgctgacggaaagcaactggaagaccattctgcaggtcaactacgatgccaatacgacgttcacgccgatgaccgacaaggaaatctacggcgtcgaggagcgctgggcctacccgcagacagctgctgactgcgaagactacgtgcttgaaaagcgcaagaaccttatcaaagccgggttttctccgtccgatctcctcgtaacggttgttctccagccgactggcgacggtcatgccgtcctgacggtgcgcaccgatcgaggcgatttcgtcctcgacaacatgcgcaacaaggtcatgctttgggctgacaccgaatacacctacctgaagcgccagtcggtcgacgatccggcccagtgggtgaagatccaggacgggcgtgccgtcgcggtcggcagcatcaagtaatctctttcgccggagcaatccgacactcgatcgagacgcctggttccgtcccgcatactcgtctaaaccggcgtcttaggagccgctcctgctgtcccaggagcggctcgttttttatgggcatcgcagccatcgcgccgccacccttaacgcttaattaaccatacaagcttgatgatcgcgacacagttcagcgataccggcggctcacgtttttcctgcgacggtcagatattcgaaagccgtcatgcgccaggcccttcaaagctccacggaggtcgaggaatcccctctcctgtcgagcggctttcttattcgcacaacccttgtcgtcacccttctggcggcactgaccgttgccatcagcattggcgggcgatggttcggcgcccgcgtttcgcttgccggaaacaccgacagcacggctcaggtcacgctgacgatcggtcaggatacgctgcagctgcaggaaaatacgattcgtttcccgagccagcgtcacagcggctccgccgagcgcgcggacctctacctaacgtggccgcagatgcagggctattccagcgagaaccgcgatcgcttcgacgataccgccaagtcatctgatctgattttcctgcaagtcacgcaggcgaccatgtcgcgcgacatgtccgggcgattcgagccgatctattcgcatctggtcgaccctacgccgcagccttacgccaatggcatgacgctgcgcaggtttcgggccgattccggatatggcgaggaagtgctgctcaccgcgccgcgccagggccgtcccgactacgtggtgcgctgccttttgccggcgaccccggaattgtccacgagcggtgactgccagcgcgatatcagggtcgggcgcgacttaagtgtgctttatcgcttctccagccggcaattggcacagtgggaacatattgatgccgctattgcccaatttgtggaaacgcgccttgtgaaccgttccgtgacatctcggtcgaatggtcccgaacggtgaaacaaacgattaatcataaacggattggtaaccccgaaaggctaccttcgatgagcttgatcgtgcgggagaagcgcggtctcgattctttctaaagtgcaagccaagcaaagagtgaaatagtgtcaaggtcagcctcctccgcttccccatcccgctccagcaatttcctgatcaaggcaatcgttgcgctgtcaatggcagttggtacgctcggcctggacctggtcaatgccgacgcgcaagcagccaattcgaagtatgcgggcatcgtcgtcgatgccaatacaggcaatgtcctctacagcgaaaacgccgatcgcttgcagtatccggcatcgctcaccaagatgatgacgctttatcttacgttcgaagcgctcgatcagggccgcatccgtctcgatagcgccgtccccttctccgcttttgcatccggccaggcgccgaccaagctcggcgttcgcccgggcacttccatttcggtcgagcaggcaattctcggtctcgtcaccctgtccgccaacgacgcctccacggcgctcggcgagttgctcggcggttcggaagaccgtttcgcccagatgatgacggccaaggcgcgtgcgctcggcatgacgcgtaccacctaccgcaatgccaatggcttgcccaataccgcgcagatgaccactgcgcgcgatcaggctcggctcggcatcgcgctgcgtcagcacttcccccaatattatggctatttctccacgcagagcttcaagttcggcacccgcatcatccgcagccataaccgcctggtcggttcggttcgcggcgtcgacggtatcaagacgggctatacgcgcgccgccggcttcaatctcgtcagctcggtccaggtcgatggcaagtcgatcgtcggtgtcgttctgggtggtgcctccacgcctgcccgcgatacccagatgcgcaacctgatcgcgtcgtatctgccgaaggcttcgacacgcggcggttcgtcggcgcttgtcgcccaggcgccgaagatttctcctgaaaccgtcattccggtgaccgtcgccaagcaggaggtcgcttccgccgccgcgctgccgcagacacgtccggcacccgtcagccgcaccgaagttgcctcggcgcaggcggcttatgccgcgccggcttcctccaagtccgaaaatccactgctgcaggaaatgccgcagccgacgcgggtgaagacacagccgatccggcaggcggcagtagcgcccgtgccgacgccgaccgcagcctatattccgccggaacagggtgacacctcggtcgatagcatcacgacggcatcggtgaaggaatcgctgccctccggctgggtcgtgcaggtcggcgtgtccgccagccgcgaagccgcgatggaactgcttgacggcgccaagaacaagggcggcaaggcgctgagctccgcaaagcctttcgctgtcgccaacgccggcagctatcgcgcacgtttcggtggcttcgacgaccagaagcaagccgtcaatgcctgcaacacgctgaagcgtgcaggcgtgaagtgctgggcctccgcccagtaatgatcgataccgccgcctatcaattcaggcggcggccccggaagtcggccttgatcggtgttcgcgacagggccggccttcctagacctgatttgtattgcgtacggggataattatggcgatcaacgagaatgttccggaatttccggccgaaggtcgattgactggcaagaatccacgctcggttctgcatccgcttcacgaagcggccatgcggcttgccgagatcggcatgccgcggccgaaaacaaccacggccaagaccaaggacttgatcaacctgctgctgtcgcacggcgcgcgcgcctggcgctactcgcagccggaagcgcgcattcatcttcacgtcaccaacccggaaggccgggcgccggtgacgatgcgtctgcgctgagccgatggacccggcctctctgtcgtcattcgttgcgtcagagaaggccgagttccgatagttcgcggcgcaagtccgccggcatttcggcgacgccctcgccgagcgtatcgagatcgcgcgggcgatcatcttccggataatagcgccagccttgaaatgcgcgcttcggctgcacggccgtttcgatgacctcgggcccgagcaccagatggcagcggccgatgccttcgccatcggtaaaagcctggatatcgagcagcttctgccgcgcctgaacctgccccttgatcacccagtagagcgaaccgccgtcgagcagttcttcaacgcgcttcgggaccatccgggtcgtatgaacggaatgcggttccatgccggcggcgatcgccctcaaggaacgctcggccacccattcgcgcaggtcgtcgatcgagtcggcgccgacgcagagtttgattagatgcaatgccataccgccgttcaaatccttttgcgcggcagcgtcaagcgacttgcgcgtgccggcggccggtagccgccggttttccaatcacagtgtgatgcaccgtccagaccgcgatagccggtctgtccgatcaacactccacgacgttgaccgcgaggccgccggtggaggtttccttgtacttctcgctcatgtcgtagccggtctggcgcatggtctcgatgcaggcgtcgagcgggacgaagtggcgaccgtcacccttgatcgcgagcgatgcggcggtcacggccttcacggcgccaagcgcgttgcgttcgatgcagggaacctggacgaggccagccacgggatcgcagctcatgccgagatgatgttcgagcgcgatttcggcggcgttctcgatctgctccggcgtaccgcccatgacggctgcgagaccggctgcagccatggcggccgccgatccgacttcgccctgacagccgacttcggcgcccgagatcgaggcattgtgcttgatgatgccgccgaccgcagccgccgtcagcaggtagtcgcggatgccgttctgatcccaatcgtcatggaagtgctcgtaatagcggatcgtcgccgggatgacgccggccgcaccgttcgtcggcgcggtgaccacgcggccgccggcggcgttctcctcgttgacggccatggcgtagacgctcagccagtcgttggcgagcaagggattgatgcggttgctgcgccactcttcctgcagcttgtcgtggatggaacgggcgcggcggcgaacattgaggccgccgggcatgatgccgtcgaccttgaggccgcgttcgatgcaggagcgcatcgcttcccagatccggtcgaggccctcatccagttcctcgcggctgcgctggctttcctcgttggcgcgcttcatctgcgcgatggagactccggagcgcgccgccatctcgagcatctgcttggcggtcgagaagggatagggcaccttgatgccgtccgacggcgccttcttcttggcgcgcatcgtctcaagttccgtatcggtgacgacgaagccgccgccgacggaataatagatgcggcggatgagcattctgccgtccttgtcgaaggcggagaaggacatgccgttggcgtgacccggaagcggctgcttcttgtcgaacaccagatcggtcttcggctggaactggtaagcgggatgcccttgcggagtaatgcggccggagcgctcgaccttgtcgatgataccgtccatctggtcgggatccacgctatcgggctgctcgcccatcagaccgaggatgacggccctgcccgtcccgtggcctataccggtatgggcgagcgaaccatgcaggctgaccttgatcgccgcgacattggcgcccgaggacgggcgcggccattcatccgacagaatcagatcgagaaagcggttggccgccgtcatcggccccatggtgtgggaactggaagggccgacgccgatcttgaatacgtcgaaaacagaaaggaacatgggtgcgtcctgttgagaatttgcttgttcaggctacgccagcgcggcctgcgatccgttcggttcaccgacatagcatttcacgcgtgcgacatcatcctgtgaaaggttccctatccgtgcgttgttgcggtcagcgcttgcatctatagagtgggcgcgtggagaaggactgaatcaatataatgatgacgacagcagattacatcgccctgtgcttcttcgcactcatgtggttcggttacgcccggctgctgcggagcgccagtctcttcggccgcaccagcctgacgcatgcgatgatcgagcgtcggcgcgagtggatttacaattcgctgcgccgcgacctgaagatgatcgatacgcagatcatggcgggcctgcagaacggcacggcctttttcgcctccacctcgatcttcgcgatcggcagctgctttgcgttgctcggggcggcggacaaggtcgatgcggtgttggccgacgtaccgctggtcttgcagagtggccgtgtggggtttgagatgaaggtaggcgggctagccgtcctgttcggctatgccttcttcaagttcggctggtcctaccggctgttcaactactgtaccattctcttcggcgccatcccgatgatgcgcgatagcgaaaacgacgttctcgcggcggagcgggccgccgagcgcgtcatccgcatgaacatcatcgccggcggtcatttcaacgaggggctccgggcgatcttcctgtcgatcggctatctcggctggttcatcaatccctacgtcttcatggtgacgaccaccattgtcatcgtggttctcgcgcggcggcagttcttctcggaggcacgattggcgatcatggatcgtgacccgtcatcaaatctccacctttctcctattccccgcactagaccgtcagccgacggaaacgactcacatgggggactgtgaatgactgttccaacgacggacaccgccgtaaggcctaaactgccgcgcatcggcctgctcgatacgctgcgcggcgcggcactgatcgccatggcgacctatcacttcggctgggatatcgaactcgtcggctaccttccgccgggcacggccacgaccggctggatgaagctctacgcccgctccatcgcctccaccttcgtgtttatcgtcggcgtcagcctcgtgctcgccaatacgccagagacacgctggaaatcgttctggaaacggctggggatgattgtcgcggcggccgccgccatctctgtcgcgacctacttcctgacaccgggagaatggattttcttcgggatcctgcactccatcgccgtgctgagcgtgatcggcatgctgctcttgcggctgcctctgcccgtgatcatcgtcctcacggtggtggcgacggccgcgtggatcgccgatacctttgtatcgccgggtatcctgcgctggccgttcttcaacccgcgctatcttgcctggatcggcttcgcggagatgccgcagcgctccaacgactatgtcccgctgttcccctggatcgtgccatttctgctcgggttcacgagcgcggcgctcgcgatcagaacggaactgccagcgaaactggccgccatgggaacggggtcaagcctgcttgccaagatcggccgtcgcagcctctccttctacctgatccatcagccggtgctgatctcgatcgccttcgccatggcttacgtcgtgccgccggccaagccggatcccgcggagacctacctgcagcagtgcaacacatcctgcaccgttgagcagggccaagcgctttgccgcagcttctgccagtgcacgctcgacaaacttcaggaacagcagctcttcacgccgtttcaatccggcgagatcaagccagatgacggtcgtatcctcagccttgccagcgaatgcagcgccgcgccccaataaggggcgcagtgcctgatcaggtgccgacaccgatctcggcgaggcggccaaggcaggcctcctcgatgttgtccaattcggccaaggtatcgtcgatgtccttacgcttctggcgcagatcgtcgcgcttctcgtcgacgcgcttcatcagcagcttgagctgcccaagctcgcccggcggctccttgtagacctggatgatttcgcgaatttcggcgatggtgaagccgatacggcgaccgcgcaggatttcctggatcaggcgccggtcggttgggcgaaacagccgcgtgcgaccgcgacgctccggatggatgagaccttcgtcttcataaaagcgaagcgtgcgcgtcgaaactccgaattcgcgcgtcaactccgtgatgctgtaatacttgctaaccggcatggatccctcgattttcaggaacccataatattgacttttacgtaatagtcaatttgtgcaacccgcttgcgagcggcctatatgccgaaccaccaggtggcgatccccagaaaggcaaagaagccggtacagtcagtgaccatggtcacgaaaaccgacgaggcgatggcgggatcggcaccaatcttgtcgagcagcaacggcagaagaatgccggcgagcgcggcggcgaagaggttgatgatcatcgccgcgccgatgacgaagccgagttgataatcgccgaaccatgtggccgcgacggtgcccatgatcgtcgagaacatgacgccattggccagaccgacggcggcctcccttcgaatgacgcgcccggcattgtagatgtcgagatcgccggtcgccagcgcgcgcacggtcacggtcatcgtctgcgtgccggcgttgccgcccatggaagcgacgatcggcatcaacacggcaagcgcgatcatcttctcgatcgattcgtcgaacaagccgatgacgctggccgagatgagcgcggtgcccagattgatcgccagccaaaggaaacgcgatctgacggtcgaagagacgttgtccgacagttcttcgtcgccgacaccgccgaggcgcttgatatcctcgtcggcctcttcgtggataacgtcgacgacgtcgtcgatcgtcagcacgccgaccagccggtcgttctcatcaacgacggcggcggagagaaggtcgtattgctcgaagagctgcgcggcctcttcctggtccatttcggccggaatcgggtggttggtctcgcgcatgatcgtttcgatcttgctctgccgcttggtgcgcaggatcttgtcgaggtcgattgcgccgagcagcctgaatgtcggatcgatgacgaagatctgcgagaaagattcaggcaggttctcctcatcgcgcatgtagtcgatcgtctggccgaccgtccagaacggcggcacggcgacgaactccgtctgcatgcggcgcccggcggaactttcgggataatcgagtgcccggcgcaggcgaacgcgctcggtgaacggcagttgcgccaggatctcgtcgcgatcttcctggtcgagatcctcgagaatatagacggcgtcgtccgaatcgagctcgccgatcgcggccgcgatctggtcgttcggcatctggtcgacgatctcgcggcggatcgcctcgtcgacctctgtcagcgccgtcatgtcgaactggtcgccgagcagctggacgagcgccaggcgttgatcaggctggatcgattccagcagatcgcccagctccgattcgtgcaggcgcgccacatgctgtctgaggaagatcgtatcgcggtcggcgatggccgcgccgactagcgccaggaagtcgccgcggacgtttccgttctcgtcgtagaggtcggcttcgttgtcctcaggacgcgtgcggacgagctcttctgcgtcgttcgtcatctttgccgccccttgcatctctctcgaagtttagagttcttcgatacaccggaagtccatccctgctagcttaaagacatgggaacgtccagcgttaaaccgttcatacggatgacaattcgccagccggaagatagtttcggcgggtctcaaatcaggagagattttcgtgaccgtccgcgccattttacgcttccctcacacaggtcttaaaacccgctgcgcgccggtgacggtcttcgacgaagcgttgcgcacacttgtcggcgatctcctcgatacgatgcgcgcggcgccgggtgtcggcatcaccgcggcgcatatcggggtgttcgagcgcgtgacggtcatcgagcttgcccgagaggatggggtacgggtctacatcaatccggagatcatcaacgcatccgaggagaccagccgcaacacggaggggagcgtctcgatgcccggagcgaccgacgaggtgatcaggccggacgcgatccggtttcgctaccatgatatcgaggggaagatgcatgaggaggacgcaaaaggcttcctcgccatctgcatccaacacgagatcgaccagctcgacggcattttctggctgcagcgtctgtcgaagctgaagcgtgaccggttactgaagaagtgggaaaaggccggcggctgatcggcctacatctcgaccggcgccggcaacggcttgcgcacggcttcgggtgctgcgatctgcgaggcgagttcttccggcgtcacgaggccgcccgagatcaggagcttcgccgcatcctccggcgacatgtcgagaagcacgatcttttcgcgcggcacgaagatcaggaagcccgccgtcggcaccggggtcggcggcaggaagacgctgaccatgtcgtggcccatggcgttgaacttcgaggcgatctcgcccttcgcatcggtcgcgatgaacaccatcgcccaaaggcccgggcttggatattcgatcagcccgaccttcttgaacgagttgctgcgttccttcagcaccgtctcgaagatctgcttgacgctcttgtagatgacgcggaccaacggcacgcggcgcacgagagactcgctgaacatcacgatctgctggccgatcaggttcttgccgagaaagccgatgagcgtgatgatgatcaggccgatcagcaggccggagcccggcatggcgaagttcaggtagttgtcgggatcgtaacgcgccggaagatagggcttcacccagctatcggcccagcgcaccaccgaccatgtcagccagagcgtgatggcgatcggcgcgcagatgatgatgcccgccagaaaattgtttctgatgcgggtcgcgaccgacaatcgaggcagtttttccgtcatcgtatgccgacgaactccgttgagtttagctgcgatcggaaatcagtgcccccatgctttccatgagaaaaactgacagaattcgccgcgccgcacaagcctaggtcggccggcctcactcgacagtgaccgactttgccagattgcgcggctgatcgacatcggtgcccatgaagaccgccgtgtgataggccaggagctggatcggcagcgagaagatcatcggcgcgatgatctcgtcgacgtttggaagaacgatcgtcgccatggtcggaagcttggagtgggcggcacccgcttcatcggtgatgaagatgatccggccgcctcgggcagccacttcctgcatgttggacacggtcttttcgaagaatcgatcatagggggcgatgacgatgacaggcatgttctcgtcgatcagcgcgatcgggccatgcttcaactcgcccgcggcatagccttcggcgtggatgtaggagatttccttgagcttcagcgcgccttccatggcgagcggatagctggtgccgcggccgagatagagcacgtccttgcacttcgacagctcgcgcgacagcgtttccatctgcggctggatggcgttgagcacgcggctcatgatgcgtggcatttcggcgagatggcgcaccatctccctttcctgatccgggctgatcgttcccctcgccttgcccgcgccgagcgccagcgatgccagcacggcgagctggcaggtgaaggccttggtggaggcgacgccgatttcggggccggccatgatcgggaagatcgcatccgattcacgggcgatcgttgattccctgacgttgacgacggcgccgatcttcaggccgttgtccttgcagtaacgcagcgaggccagcgtatcggcggtttcgcccgactgcgagatgaagagtgccgcctgggtcggcgacagaggcatctcgcggtagcggaactccgaggcgacgtcgatctcgacaggcaggcgcgcatagcgctcgaaccagtatttcccgacgagacccgcgagataggcggtgccgcaggcggaaatcgccagaccgctcaccgatttgaaatcgatcgccgccgtgttggcgctcagcgtgttgctggcgaaatccacatactggctgagcgcgtgagaaatgacctcgggctgctcgtagatttccttttccatgaagtggcgatggttgcccttgtcgacgacataggccgtcgtctgcgagatctggcgcggacgcgaaacttcgttgccggcgaaatcgaggatggtcgcgccatccttcgtcagaaccgcccagtcgccgtcgacgaggtaggtgatctcgcttgtgaaaggcgacagcgcgatggcatcggagcccaggaacatctcgcccttgccgtatccgattgcgagcggcgggccggagcgcgccgccatgatcgtgccggggtccttctgcagcatgacggccagcgcgtaggcgccggtcacgcggttcagcatcttcatcatggccgcgcgcggctcaaggccttcgccgagatatttcgcgacaagatgcgccacgacttcggtgtcggtctgcgtttcgaacacggcgccctcggcggtcagttcgtcgcgcagctcggaaaagttctcgatgataccgttatgaacgacggcgacgcccttgacgaaatgcgggtgggcgttggtttcgttggggacgccgtgcgtcgcccagcgggtgtgagcgataccgatcgtgccggccagcggctcggcatcgaggcgcttttcgagattgaagagtttgccttcggcgcgacggcggtccatggcgccgtcgtgaatggtagcaacgccagccgaatcataaccgcgatattcaagccgcttcagcgcatcgaccagacgcaccgccacagggctgttaccaacgataccaacaataccacacataaagaaatcctcagggccagcaatcaattgcaggcagtcgtaacaattttcgcttttttctcaatcggctcggcggtcactttcggtgaccgcgcgttacgaagacaatcagcctttcgccttcttcgcggccttcttcgcgagcgccagttcgcgcaggatggcggcgcggccgggcttgatttcctggcgcgcgcgcccgaacgccagcgcgtcggccggcacgtcattggtgatgacgctgcccgaggcgatgtaggcgttgtcgccgatgctgacgggcgcgaccagcgaggagttcgatccgacgaaggcatgcgcgccgatcacggtctcgctcttgttgacgccgtcatagttgcaggtgatcgtgcccgcgccgatattggcgccggcgccgatgcgggcgtcgccgatataggtcagatggttgaccttggcgccctcgcccaccttgccgttcttcacctcgcagaaattgccgaccttcgatccctcggcgagatccgcgcccggccgcagccgcgcgaagggaccgaccgtcgcgccggcgctgacatgcgcgccctcgatatgcgagaaggcgtggatgacggcaccaccgtcgatcaccacgccggggccgaagaccacgttcggctcgatcagggcatcctggccgatgaccgtgtcgtaggacaggaagacggtttcgggcgcgatcatgctgacgcccgacagcatcagttcgtgacggcggcgctcctgccagaggcgctcgatgacggcaagttcggcgcggttgttggtgccggtcatttcgacctcgggggcatcgaccgcggtgacgcggccaccctgcgagcgggcgatctcgacgagatcggtcagataatactcgcccttggcattgttattgccgatcagcgccagcaattccagcgccttgcggccgttgatcgccatcaggccgctgttgcaccaggtgacggcgcgctcggcatcggtcgcgtccttttcctcgcggatggcgatcagttcgccgtccttgaccagcaggcggccgtagcccgtcggcttgtcggtgtggaaaccgatgacgacgatatcgctgccatcggccagcgcctggcgtgccgccttgagcggcgcttcggtctgcaggggaacgtcgccgtaagttacgatcacatcgtcatagccgcgggcaatggcatcgcgcgccgcgagcaccgcatggccggtgccgagccgttccttctgcagataggcctcgatctcgacgccaccgaccgcggcggccttggcgacctcgtcggcatcgcggccgacaacgagcgccacggcgccgatagcggtcttggccacggcttcgacgacatgggcgatcatcggacgattggccaccgggtggagaaccttcgacttcgacgatttcattcgcgtgctgtcacccgcggcgagaatgacggcaagacaagtgcgttccatggtctgctcccaagaatccgttacaggcgcgttgccgcctcatagcagcaagtcgctgacggaacaaagatcaaaaaaggatcaggcggaaaccctggtcattccggcataggcgtcatggacgtgatcgcgcccctcgacgatgaccgcttccatggcggtgcgcgccgccggcacgtcgcccgccgcgatcgcgttgacgatgcgcatatgcgtttcggcgatgttcgagaagccgttctgcgacggcggtgtgctgatccggaacatgccgacgagcgccgcctcgatgaggcttcccaacgtatgcatgaagggattgtgggcggcgtcggcgatcgccatgtgaaactgcaggtccgccatcgccaggctttccgtcgtgtgatcgggtgcggccatgtccttggcgagatcggtcagcagcgcgacctcctcagccgttgcccgctccgccgcgagaccggccgcgaagggttcgacggccagccggatatcatagagctgcagcaggaattcctcggtcacgtcgtcgtcgaagtgccaggcgatcacctcgctgtcgaacatgttccactggctcttttcggtaacccgggtaccgacgcgtgccttggcgacgatcatgcccttggcggccagcgtcttcatcgtttcgcgaagaaccgtgcgggacaccttgaagcgttgcgcgagctctatgtcacccgggagaatggttccgacaggataggttccggccacgatggcgcggccaagttcatccaccacctgcgcgtggctggtgcgagatcgccgttgtgtcttcccggtgtccagaattcgattgcgcaagccaacagcccccgtcaggcatacctcttgttcagactagagaggaacaggatggctttctgcatcaggatgaatgcaaaaagcagcaggccgatcagtatcttcgtccaccaactggagagtgttccatcgaaggtgatgtaggtctgaatcaacccctgtatcaggaggccgatgaaggtccccgctacaaatccggctccacccgtcagcaaagtgcccccaatgacgaccgccgctatggcatcgagctcgacaccgacagccgccaacgagtagccggcggacgtatagagggaaaaaacgattcccgacaggccggcaaggaagccggacagcgcgtaaatctgaattgtggtgcgaccaaccggcacacccatcaactgcgccgtgtgcgcaccgccgccaagcgcgtaaacgttggtgccgaaccgggtgcggtgcgcgatgaagatgccgaccgcgaagaccagaagcatgaccgcccctaccagcgtcagtcgtccgccgccgggcagcttgtaatagaggccggagagcgtgctgtaatagtcgtggctgatcgggatgctgtcgatggagagcacgaaggccataccgcgcgccaggaacatgccggccagcgtgacgatgaaggccggcatctgcagatagtggatgacggcgcccatcgcagccccgaaagcggtggtgatgacgaggaccagcgcgaaggcggccagcggatggatgccggtgttctgcaggatgacggcgaggaacacgccggtgaaggcgatgaccgagccgatcgagagatcgatgccgccggagatgatcacgaaggtcatgccgaccgcggcgataccaaggaaggcgttgtcggtcaggagattgccgatcacgcgtgtcgacagcatgctcggatactgcatcgcgcagacggcgtaggagaggatgaagatcacgatggtcgcgagcagcggcaggtatttcgaattcatttctgcattacccctctcgggctggagcgacgccccatgaagacggctgccgattgcacggccggagactgaatcaccaggatcacgagaacgatcaccgccttgatgatcaggttgaactccggcgggaagcccgagagcaggatgccggtgttgaccgactggatgatcatcgcgccgatcagggagccgacgatgctgaaacggccaccgagcagcgaattgccgccgacgacgaccgccaggatggcgtcgagctcgagccagaggccggcattgttggcgtcggcgcccttgatatcggccgcgacgatgatgccggcgatcgccgcgcacaatccgctcagcatgtagaccgccatcaggagcaccggcgtgcgaacgccggacagcgtgcttgcgcggcggttgatgccagttgcctcgatcagcatgccgagcgccgtgcggcggacgaggagcgtgacaagaaggccgaccgccagccagatgacgacgggcatcggcatgaatgcgaaggagccgctgccgaagaaggtcaggccatcatcgttgaaggtcatgatcacgccttcggtgatgagctgcgcgataccgcggccggcgaccatcagcaccagcgtggcgatgatcggctgaatgttcaggacggccacgaggaagccgttccagaccccgcatgccagaccgaccaagagcgtgagcaccaatgtccaggcgagcgaattgccggatacgatcgacgacgcggcgacggcgccgcagatggcgatgaccgcgccgacggacaggtcgatgcccttggtggcgatgacgagcgtcataccgatcgccagcaatgcgacgggcgcgccgcgattgaggacgtcgatcaaactgccatagagcctaccgttttgaatggtgacattaaaaaactgcgggaacataatgaagttcaacagcaatattactgccaaagctatcagttgcggtgccaggcggatcagcagcgccttctgtgacgacgtcatgcgtcctccgtctttttctgcacggcggcgattgcctgcacgatgcgcgaggtgctgacgttctcacccgtcaactgcgccacatgctcgcggtcccgcaataccaagatacgtgaactataagcgataagctcttctaattccgatgaaatgacgatcagggacatgcctttttcgcacagttcctcgatcagccggatgatctcggcatgggcgcccacatcgatgcctcgcgtcggttcatcgaggatcaggaagtcgggattggtggccagccagcgggccaggatcgccttctgctggttgccgcccgacagcagtcggatcggcttttcgcggtcggtggtgcgaatatcgagcgccttgatgtactgatcggcgagcgtgttctgctcaccgcgcgacagcggccgcgcccatccccggcgggcctgcagcgccagcgcgatgttctcgcggatcgagagatcgccgatgatgccatcggtcttgcggtcctcggggcagaagccgaagccggcgcggatcgcggcgcgcggattggagagcgcgatcggcttgccatcgatcttggcggtaccgctatcggcgttctcgatgccgaagagaagttcggcggtctccgtccgtccggagccaagcaaaccggcgacgccgacgacctcgccgacgcggacgtcgagatcgaacggcttgaccttgccgcgcttgccgtatccctcgaagctgtatttgacggggccggcggcgacgctgcgctccttcacggcggcctcggcatgcgccagttcgtgaccgagcatcatcgagatcaggccttgccgcggcaattcggccttgtcgcgggtgccgaccagcttgccgttgcgcaacaccgtgatgcggtcgctgatatcgtagacctgttccagaaaatgagtaatgaagacaatgccgaggccgcgtttcttcaagtcacgcatgatgccgaagagcatggccacttcctgcgcgtcgaggctggccgtcggctcgtcgaggatcagcaccttgcccgagagatcgacggcgcgggcgatggcaacgacctgctgcacggcgacggagaagcggtcgagctgggcggagacgtcgatctccatgccgtactggcgcagcaattcgcgcgcctgacggttcatggcggacacgtcgatcatcccgaagcgcttcggctggcgtccgagaaagaggttttcggcaacgctgagattgggaaggaggttgacctcctggtagaccgttccgatcccgagcttctgggcggccagcgtatcggccggatcgatctcgacgccgtcaagcgtgaggctgccttcgtccctgagataagcgccggtgatgcacttgatcagcgtcgatttgccggcgccgttttcaccgagcagcgcgtgcacctcgcccttgcgaagggtgaaatcgaccttgtcgagggctacggctccggggaagaatttcgatatgccggttgcggctaggacgttctcgaaattgtgaatcatcaagtggatttttcctgatattgaccgacacggcctgatagcaacccgacatgatgtctggcagcgttcgcggcagttccgcaccggtccatgacggaccggtgcggttcctatgtcagatcaatagccaaggcccttcttggactcgtagaccttcttcggatcatcagcctgggtgtagagcttcgattccgtctggatccacttcggcggagccttcttgtccttgagataggcatcgagcgcgtcgaaggcaggacccgccatgttcggcgtcagttcgacggtggcgttggcttcaccggcttccatcgccttgaagatgtcaggaacggagtcgatcgaaacgacgaggatgtccttgcccggcttcaggccggcttccttgatcgcctggatgccgccgacggccatgtcgtcgttatgggcgtagagggcgcagatatccttgccaccgttctcggccttcaggaagctttccatgacttccttgcccttggtgcgggtgaagtcgccggtctggctgcgaacgatcttgaagttcgacttgccagcgatggcgtcctcgaagcccttcttgcgggcgatcgccggcgaggagccggtggtgccctgaagctcgacgatgttgcacttcttgtccgcaaccgtcttcacgagccagtcgccggcaaccttgccttcgtgcacctggtcggaggtgacagcggtcaggtagaggtcttcaggcgccttgatcgtgcggtcgagcaggatgaccgggatatccgcttccttggcttccttcagaaccgcgtcccagccggtttcgacaaccggtgcgagcaggatggcattgacgccctgggcgatgaaggagcggatcgccttgatctggttttcctgcttctgctgagcgtcggcgaacttcaggtcgatgccgcgcttcttggcctcttccttggtgacggtcgtttcagcagcgcgccagcccgattccgaaccgatctgcgagaagccgacaaccagttcggcggcctgtgccgaaccgaacatgcaggcagcaaaaaccgtggcactcatgagtgctgtcttgaatttcatgatttcctccaaaagccgcctcccgcggcacgcactaggaaaatcatatagtattacttttgtaaatgcactttctggtatgcactgcagcaaaaagggcgcccgaaacgagcgccctttcgcacctgctaacagcaggaaaagctcacttcggcagcttgtcgtccacgccctcgacgtagaagttcatgccgagcagcgtggcgtcgtcggccttctcgccggccttcagccacggcgtaccgtcctgcttgttgatcgggccggtgaaggggtgcagttcgccggacttgatcttggcctcggtttcctcggccatcttcttcacgtcgtcaggcatgttggtgtagggcgccatttccaggatgccgtccttcaggccgtcccagctctgctcgggcttccaggtgccgtcgagcagcgcgcgcacgcgcttggagtaatagttgccccaggtgtcgacaatcgccgtcaactgcgccttcggaccggccgcgatcatgtcggaggcctggccgaatgcgtggatgccgcgctcttcggcaacctgcatcggcgccgtcgtgtcggtgtgctgcgtcagcacgtcgacgccctggtcgaccatggccttggcggcatcggcttccttgcccgggtcgaaccaggtgttgacccagatgaccttcagcttgaaggcgggatcgaccgacttggcgccctgttcgaaggcgttgatgcccatcaccacttcaggaatggggaacgaggcgatgtaagcggcgcccttgttcttcgaggtcttggcggcgatctggccgaggatgtagcggccttcgtagaagcgcgaattgtagttgcccagattcgggccgctcttgtagccggtgccatgctcgaacttcacatccgggaacttggcggcgaccttgacggtggcgtccatgaagccgaacgacgtggtgaagatcagcttgcagccggagcgggcgagacgctcgatggcgcgctcggcatccgggccttcaggaacgttttccaggaaaggcgtatcgatcttgtcgccgaattccttctggatctgctggcggccgagatcgtgcgcctgcgagtagccgccgtcggtacgcgagccgacgtagacgaagcagaccttggtcttgtccgcggcctcagcggtcgagccgaagctcataatggccgccgccgaagcggcgaatgcgaatgctagtcttttcatgataacccctgtggtttggaagttcattgttcgtttgttgttgttctatcgttccgggacgaatggttttcccagtgacgccggtgtgttgatcagcgtcgtgcgccgattatgagaaatgatgacgagaaccacaatagtcgccgcatagggcagcatcgacaggaactgcgccggaatgccgatgccgaaagcctgggcgtgcagctgcaggatcgtgaccgcgccgaacaggtagccgccggcgaatacccgccacggacgccaggaggcgaagaccaccagcgccagcgtgatccagccgcgaccggacgacatgttctccacccattgcggcgtgtagaccagcgacagctgcgcgccggcaagccccgcgcaggcaccgccgaacatcacggcgagatagcgcgtgcggatgacgccgatgccgagggcatgcgccgagccgtggctgtcaccgatggcgcgcagcttcaggccggggcggctgcggaagaggaaccagctgacgccgaagagcagagcgagcgacaggtagaaggtcaggtcctgcttgaagagcaccgagccgacgaagggaaggtcggagagatagggcacgacgatcggcgccaggcgaacgccggggacgctgacatagccctcgccgagcatgccggacaggccgagaccaaggatggtgagcgccaggcccgtcgccacctggttggcgaccagtgtcagcgtcaggaaggcgaagagcagcgagaacagcgcgcccatggcgatgccggccagaagcccgacatagggcgagcccgacatctgcgccccagcgaaggccgcgacggcgcccatgatcatcatgccctcgaccccgaggttcagcacgccggagcgttctgtcacaagctcgccgagggcggcgatgacgagcggcgtggaggccgtgatgacagtgagcaggatcgcttcgaaaatgctcatgccacacctcccctgacgcgcgaccagacgatgcggatcttgtagaagatcagcgtgtcgcaggacaaaacgaagaataagagcagcccctggaatacacgggtgaccttgtcggaaacgccgatggacagctgcgccgcctcgccgccgagataggtcagcgccagcaccagcccggatgcgatgatgccgagcggattgaggcgtccgaggaaggcgacgatgatcgccgtgaaaccgtagccgggcgagatcgccggctgcaggtggccgatcgagcccgagacttcggagatgccggcaaggcccgcaagggcgccggagaacaggaagctgaaccagatcatcttcttcgacgagaatccggcgaaacgccctgcccgctcggactggccgagcacgacgatctcgaagcccttgagcgtgtatttcagcatgaaccaggcgaggatcgcggcgatgatcgcaaagacgaaggcccagtgggcgcggccggacgcttcccagatggccgggagcaccgcttcggggggaaaggacacgctcttggggaaattgaagccggcgggatcgcgccagggaccgcggatcagccagtccagaaacagctgagcgatatagaccagcatcaggctggtgaggatttcgttggtgttgaaatacgcctttagcagagccggaataccggcgaaaagcgcgccgccaagcgcgcccatgaccagcatcagcggcagcaccaacggcgattgccacccggtaaacaggatcggcaggatcgagcccgcgatcgcgcccatggtgaactggccctcggcgccgatattccagttgttggagcggtagctgactgccagtccgacggcgatgatgatcagaggtgccgccttgatcgccagttcatgcagcgaccagacctccagcagcggttccaggaaaaaggcatcgagcgcctcgaccgggtccttgccgaggatcttgaacatgatggcgccggtcaccagcgtcagcaccagcgccaggagcggcgagacgagaccgtagagcttcgacgcctgcgggcgcttttcgagttcaatgcgcatgcgttgtctccggcgcggtcttgctctcatgcaggccgcccatgagcaggccgatcttctcgcgcgtcagctcgccggccggaaacggcgaggacagccgtccctcggaaatcacggcgatctcggtcgcgacctcgaagatctcgtccagatcctggctgatcacgaccaccgccgaaccattgcgggcgagatcgacgagggcctgacggatgcggcttgcggcgcccgcgtccacgccccaggtcggctggttgaccacgaggacggccggctggcggtcgagctcgcggccgacgatgaacttctgcaggttgccgcccgacagcgagccggcggcagggtcctcgccgctcttgcgtacgtccatctgctcggaaatacgcttcgtcgcgttcttgacggcgccgcggcggatgatcttgaggaagccgcccgacagaaacgccttgcggtcggatttgctgcgggcgagcacgaggttgtcggagagcttcattgccgataccgccgcgtggccgtgccgttcctcgggcacgaagccggcgccgagcaggcggcgggcggtgatccctagcgttccgaccggcttgttgcggatgacgacggcatcgggggtcgataccggatattcgcccgacagcgcatcgaacaactcgccctggccgtttccggcgacgccggcgatcgccaggatctggcccgaacagacggtcagcgacacgtccttcagcggcatggcgaagggcgtgcgcggggcgacggagaggccggagacggcaagctgaaccggccccctggaaccccggtccgggtgggtgaccgaagccacgtcgtttccgaccatcatgcgggccagcgatgccggtgtttcgtcggcgggtacgcaggcgccggtaaccttgccgtggcgcaaaaccgtggcgcggtcgcagatgcgctgcacctcttccaggcggtggctgatataaagcaccgagcgcccctcggccttgagcttgaagagcgtctcgaacagcttgtcggcctcctgcggcgtcagcaccgaggtcggctcgtcaagaatgatcagcttcgggttctgcagcagcgcgcggacgatctcgatacgctggcgctcgccgacggacagatcggccacatgggcgtgcgggtcgagcggcagtccataggcatgagacagcgccctcgcctcctcggcgatcttgccgatcgggatgccgtcatcaagcgagagcgcgatgttttcggcgacggtgagcgcctcgaacagcgaaaagtgctggaacaccatgccaatgccgagcttgcgcgccgcgcccggcgagccaatcgccacgggacgcccctgccacaggatctcgccctcgctcggttccaggacgccgaacagcatcttcaccagcgtggatttgccggcgccgttttcgcccagcagtgcgtggatttcgccgggagcgatatcgaggtctatctggttgcaggcagcaaagctgccgaagagctttgtcagcttctggaccgacaataacgcgcctgatgccggcacagtcgatgacgacactttcccctcatttcccactgccgacctgccccttcgggatcattctgggatcagcagcgtcgttccggtcgtttttctagcttccagttccgtatgggctcgcccaacctcgcgcaacggataggtctgattgacattgatacgcactttgttgctcaaaacaacatcaaataatgcgtttgcacaatcagttagctcatcgcgcgtggcgatataggtgaaaagcgtcggccgggtggcgaagagcgagcccttctgcgcaagcaacgccagggtgaaatcctcgatcggcccggacgactgcccgaaggacacgaacatgcccaggcgcttgaggcaatcgagcgattggggaaaggtatcgcggccgatggaatcgtagacaacatcgacgcccttgccgccggtgatttcggccaccctggcgacgaaatcctcggtggcgtagttgatgacgtggtcgtagccatgctcgcgcgcgagctgcgccttggcggccgatccgaccgtgccgataaccgtcgcgccgagcgccttggcccattggccggcgatcaggccgacaccgccggcggcggcgtggaagagcagcgtggtatcggggccgaccttgaaggtgcggttcaacagatactgcgccgtcatgcctttcagcatcatcgccgcggctgtttcaagcgcgatgccatcgggcaccgtgaccagatgcctggtctcgatgttgcgctcaaggctgtaagcgccgtcggagccggcataggcgacgcggtcgccaaccttgaaatccgaaacgccggggccgaccgccttcaccgttcccgccgcttccttgcccggcacgaagggcatgtgcggggccttgtagaggccggtgcggaaatagacgtcgatgaagttcaggccgatcgcggcgtgccgtatccgcacttcgccggcctttggcggcggcaggtcgatatcgacatattcgagaacctcgggaccaccggttccgttcagcacgacggcctgcgtcttcgtcattcgtcttctcctaagcgcggcgccccagcgccggcaggaactgcaggacggcaccgatgcaatacagatagataccgctcgcaacgaaaagaacgagagcccattgcggcacgacgaaatgcatcaacagcgcgtagacgccgatcgccgaccacaggaggaagacgccgagattgagcggacgcaggcgcttgacgcgcaccggatgcagaaaattgatcggcaggaaggtcaagatcaccgagacggtgacgaccgcgagtgccgtcgtggcgctcgcatccatgacgaacagcgtgaagacgatcatgttccagaccacggggaaaccggagaagaaatactcctccgtcttcatgcccatgtcggcgtaatagatagcactcgacacgacgatcatgccggcggcgacaaacgaccatggctcgccgatcatgccactctgatagagcgcgaatgcaggcagcagcacgtaggtgacgtaatcgatgatattgtcgagcgtatcgcccgaccagttcggcagcacctccttgaccttgaccttacgggcgatcggtccgtcgatgccatcgaccagaagcgccaaccccagccaccagaacatgtcgacgaaacgctgctcggcggcggcgacaacaccgaggaaggcaagaaaggaaccggaggccgtcaaaatgtggacggaaaatgcgcgcatttccgcgtagggtacgcgcttgtagttgaaaatcttcatgtttccccgagttgccataagcaatccgcacccccgaggcgcgatttcggcttaatatgcatcctttgtccggcttcgccagagcaaaagcgaacgatgcacatcgcgtttcccaaacctgacgagaacatgcatatttcatgcatgtcgccgcggagggaatggtatacctttaatccgtggcctatttgtaatatctggctcgcatcgaattgatgatcgacgaactacgggatccgataccgcaatgaacgcccctgcaaagaccgaagaattcgcagccccaatccctgccggcgtcttcgccgaaaccgttctcagcgtcacgcactacacggaccatctgttccgcttcacgatgacgcgtcccgaggggttccgcttccgctcgggcgagttcgcgatgatcggtctcatgatcgagggcaagccgatcttccgtgcctattcgatcgccagccccgcctgggccgaggaactcgaattcttctcgatcaaggttcccgatggtcctctcacctcgcatcttcaggcgatcaagccgggcgatcaggttctgatgcgcaagaagccgaccggcacgctggtgctcgacgcgctgacgccgggacgtcgtctctatatgttttcgacgggtaccggcatcgcgcccttcgcgagcctgatccgcgatcccgagacctacgagaagttcgaccaggttatcctgacccacaccacgcgcgacgtggccgaactgaagtacggcttcgatctggttcatgagatccagaacgacgagcttttgcaggaagtggtcggcgacaagctgctgcactatgcgacggtgacgcgcgaggatttcgcgtatcgcggccgcatcaccgacctgatctcgtccggcaagctgttcaccgatctcggcgttcccaagctcgatccggagatcgaccgcggcatgatctgcggctcgtcggcgatgctgaaggataccaaggaactgctggagaaggcgggtctcgaagagggcgccaacagcaagcccgcacagttcgtcatcgagcgcgccttcgtcggctgaccgctccgattaatcgtctgtcgcatgaacaacggctccggaaacggggccgttttcacttgtggccgagataatcgatcaacgcggtcatcgccttgcgcgcttcaccggccttgccctgctggatcgcgcgaatgacggcgacatgaagggagatcgaccgatccatgcgctcggggcttgccttcgaataccagagccggcgcgaatgggtctgcacggggccgagcgccgaggtgatgaaggcattcgggcacgactcttccagtatctcgtcgaatgccttgtccgccgcgaagaaacccgcgagatcgccgctgacggcgcagttattcatcgcacgcgcgcattcgacaagctggttgcgctgcccttcggtcgcgtgttcggcgacgagggccgcggcgatcggctcgagctcacggcgaacctgcatgacatgggcgtggtcggtcgccccgatctcggcgatctgcagcccgacgcgtggcttcaccacgatcaacccctgccaggcgagcttctgtatcgcttcgcgcaccggcgtgcgaccgtgtcccgagagatcgatcagctgcttttcattgacgagcgcaccaggcgtcaacgccagggtcacgatggcatgttccagcgccaggtaggcaagatggctctgtgaggagttcggcatcgcggatccgtgattcgagctgatatatcataacgtaggcaccaacggattcaatggcaggttgccatgatatatcagaccgagaggtacgtccgttcgttcacaagggtttattcgtgcctcagcgcatcgatcggattgagctgcgcggcgcgcctcgccgggaagtagccgaagatcatgccgatcgcggcggagaagacgaaagcgacggcgatcatcgtcgggctcaccacgaacggtaccttgagcagggaaaccgcgccgaagccaagccccaatcccagcagaatgccgctcataccgccgaatatcgacaaggccaccgcctcgacgaggaactgcatcaacacctgccgctccagcgcgcctatcgccaggcggatgccgatttcgcgcgtgcgctcggtcaccgagaccagcatgatgttcatgatgccgataccgcccacgagcaggctgatggcggcgacggcgccaagcaggctggtcagcagcgtcgtcgttccggtcatggcggcggcgatctgggtcatgtcgttgacgctgaaatcgtcctcgcggccgggaatgatcttgcggcgttcgcgcagcaggttttccgtatccgactgaaccttggacgtcgcgacaccgtcacgcgccgagatcaggatcatcgagacattggcattggccttgccgccgatgcggcgctggtagaccttgatcggaacgatgacgacatcgtcctggtcgttgcccatgccggactgcccgcgcttggccaacacgccgatgacgccgcaggaaaccttgccgacgcgcacctgctggccgatcggatcggccgaaccgaagagctgcgaccggacggtctctccgagaacgcagcgcgcgcggccgcgctcctcggcggcgtcgaagctgcggccggatgcgatgtcccagtcctgcgcggtgaaataatcgttggtggtgcccatcaccgtcgtcgaatggctctgcccgccatagatcacggtcgccgtcgtctggttgagcggcgccacggccctgaggccgccgacctgctcgctgatggcatccacgtcggcgacggtgaagcgccgcgcctcggcactcgcgcggccgggaccgaactggccggggcgggcaaagagcatgtttgtgccaagccgcgacagctcggaggtgacctgtgccgtcgtgccattgccgatcgtcaccagtgcgatgacggcggcgacgccgatgacgacgccaagcacggtcaggaacgaccgcagcatgttgcggctgatggcgcgcagcgcgagcttgaccgtctcaagaaacatgacccgcccttccctgatgcgcggtttcggtttccagcttgccatcgacgaagcgcagcagccgctgggcataggccgcgatatcgggttcgtgcgtgaccatgacgatggtgatgccctgctcgcggttcagccgcgtcatcaggtccatgatctcgatactggtcttggtgtcgagattgcccgtcggttcgtcggcgagaagcagggatggtcgggtgacgatggcgcgggcgatggcgacgcgctgctgttggccacccgacagttcctgggtcttgtgatgctcgcggccgccgagccccaccagcccgagcgcttccgtcgccagacgatgccgatccgctgccggcatgccgcgatagatcagcggcagctcgacattctcgaccgccgaggtgcgcggcaaaaggttgaagccctggaagacgaaacccagcatatgccggcgcagcatagtcaattgcgcgcgatcgaaaccggtggtcgaaataccctgaaacagatagtcgccggcgcttggaacatcgaggcagccgagaatgttcatggccgtggacttgccggagccagacggtcccatgatcgcgacgaactcatgttcgcggatcgccagatcgacatgatcgagcgcgcggatcgaggcttcgccgcgaccgtagatcttcgacaccctgctgaactcgatgagaggcggcgttgtcatggcgcgccttttatctcgaccgctcggtcgaatcggtgatgatcgcgtctctttccttgagatcgccggagaccacctgggtgaactgcccgtccgaggaaccgacctggatgacaacgggcgccggattgccggctttcagtacccagacgcgacgcttggcgccggtcagcgtctcgccgccgccctggttgccgccgcgtcggcccatgcgcggcggagcgaatatgccgaacaggccacggttccgccttgcttccgtggccggcggcgcgtagcgcaaggcggcattcggcaccatcagcgtgctcttgaccgcctccaccgtaacgtcggctgtcgccgtcatgcccgggcgcagcaacagatcggcgttgtcgacggagaggatggccttgtaggtgacgacgttgttcgtcgtctccgaggcgaagcggatctgcttgatctcggccgggaatgtgcgatcgggataggcatcgacggtgaaggtggctttctggccgacggcaatctggccgacatcggcctcatcgacatcaacctgcaattccatcttcctgaggtcgccgccgatgacgaagagcacgggcgccgacagcgaggcggcaactgtcgcgcccggatcgaccgagcgcgtcaggatcacgccattgatcggcgagatgatcttggacttggcgagattgacctgggcgagctgcagatcggcttccgccgacagcaccgccgcttcgttaatctctttcgtggcaacagccgaatcgtacttgtagcgcgcgtcctcgaggctctgctgcgtggtcacgttgctctggacgaggttgcggtagcggtcgtaggaactcttggcggattcgagatcggcggtggccttgacgacgttcgccttggccgaatcgagtttcgcctgcgtgctcttgacgtccgcctcgaccttgatcgtgtcgagcacggccagcacgtcgccagccttcacctcgctgttatagtcgacattgacatcgcgaacggtaccagagagctcgctggatatatcgacctgttcggtcggctgcaccgatccggtcgccgtcacgaggacggtcaggtcgccgctcttgaccggttgcgtggtgtagctcacctcgccggcgccctggcgcgaatagagatagaggccaccgccggccaccaccgcgagcacgaccagcgacacgagcgagcgcttcagccaccggcccttctgcttctgccgcgacgcggcaagcacagcggcgagatcggcggttgccgtgcttgtcggttggcccgtgctcttgggttcgtttggcttggtcatatcgttcatgcgggcggcctcggtcagatacagccaatacgactgtcagcttcgggaataacggtccgaagctgaacgcaggattagcaagttgaccgcattggcacgcagcaacgtcaaatggaaatgaaatcttggtaatgaaactcgagtttgtcgcgcgcgaacggcgcaattccgacgtcgcttgagattcccaacccacgggcgctggcggcccgcgcgcttgtcgcaacaattcgcaggcggatggcgcctatcaggcgccaagtgattccagcgagaccggcggacgacgcttggcggccatcagcagatcgagctcggtggcagaagggccgaacttctcgaacaggcgaatggcttcatcgtcacccagccggtatttgcgcgagaactccgtcagactgtaggcacggccacgcagtaccttacgtgtattggtgtgttcgatcacattggtcattgtcatctccttgtataaagaagatttagggtccaggatcgatttgttaagtcgcaaacgcgattgaaccgattgattttcttaaatatttttagggaactttatcatcactcgcgcattgcatgcttacaatccagccataaatgctgtcactgacggcggtcttcaccgcgatcttacgcttgcaccgtcaatccataaaaagcagactttcccgcggccatgaccaccgtctgcttcgccgtcccgcgcaagaaatgtgcctaatgcacaggaaaggtggatttttcagttgaccgcaatgggtcgtctgcatatgttccgcgcacttccagccggggtccttcacggatacttcggaacacgggagagcgtagctcagctggtagagcaactgacttttaatcagtaggtcatgggttcgagccccatcgctctcaccacgtaaaatcaatagcttatgatgtcatttggttttaactgctactaagcgggatgtccctcctgcttgcgttttgcggttccaacaccctcgcgcgatctccctacgtccttaatgcgattggctaaggcgatgttcgcgtcgcttccggctatcgtcgtcgcgtccgtcgacgtgtttgggggtgcgaaatggatgctgcagcagctcgaaacgtgttcgtcaacggcgaccggtccgtgtcagcgcgcatcaggatcaaacgctgggagatgattctggagctcatgccggatctgcccaatatgagaatcctggatctcggcggaacgagaagctggtggcacgacgcaccattccagccgccacaggtcacgatcgtcaaccttgatatcgacgaacagagcggccggatcagaacgatccgaggcaatgcctgcgaagcagacgtgattccgcaagacgaacgattcgacctcgtcttttccaacagcctcatcgagcatgtgggcgggcatcagtcatttttgaaactcgcgcaggtcgcaagcaaaatggcgccgcgctacctcatccagacgccctatcggtatttcccgatcaagccgcactggctgttgcccgacatgcagtccatgccgatggcgcctgatttcaagaccgcgcagtggtggccgttcgggcatggttgggggtgcccgcagggccggacgttcgacgaggtgcagtcgacgcaactcctgacggtaaccgagatgaagcgctatttccccgacgccaccatccattgggaacgtttcatgggcctgccgaaatcgatgatcgccatccgctagaggctgccagttgtccgttgtcgctgaccgggcgattctccggaacatttgacgttgccgccagttctagcgatgcaaacattggagagcaccatgtcagaccgtgagaaagacattcgcgaccgcgcccacgccatctgggagcgcgagggcaagcctgagggacggcatgaagagcattggtcgcaggcggagcatgagatcagtcatggcggcgaccagatagacggcgatgacgtgccgaatctcgaggcgctccgcgaagccgcgagacagcatacggatgcattcatcgtgaagacggatctggaagatgccgaccagcgggaagcgacccccggcatgcgtgagcagccatagagcgagccgcatgcgcggtgaacacagaatgcaaccagctggcctgccgtgcgttctgtcacaggttccacgaaaaggattgtgacatgacttcctccttaaccacgaagatcgcggctgttctttgcgtcatgctagccctcagttcctgcggcaatacgatccgcggcatgggcaaggacgccgccaacaccgtggatgcgacgcaaaatgcgggcaaccgggttggcaacgccgctgccaagtagacggcccagataagctgggctggctgacgtgcccgtcgagacaggcgatcaaggccgaggcatatgggatgcctcggccgtcgccgcctttaccagcgcgccgatcaatcctactctgccgtggcattcgtcaatcgagcgacgcgcgccgatcgcttgtccgcgcgaacattgagggcatgtcatgaccgttcgtccgccgcaatcgctgaggcaaccgttctcgatcgaaggcgggttcaatgttctcgaatacgagttgagagccgaacgcgcgagttcgctcggtcgcagcgggctgaaggcggaagaggcattggccagtctgaagggctgggacgcctcgcgccatcaccaggaagaccgcgacgcgcgcctcagtaaggccgtggacgcggtatggggtctcttcgtccagcgtgagatctgcggcctgcgcaacagccgcgacgtcgtccagcgctacggcattcccgacgaggtgctggtgcggcttgggtcgacgcagaaatagaaagcactacccttacttcggccctcactcaggcggaaccgcgtcttttgctatccggtagaagcacggatgccatgacggtcatgttccgtccctgcgctttggcttccagcagcgctgcgtcggcgcgggtgagcaatgtcgagacggcggcgcgttccgccagcgagccgacgccgatcgataccgagatcggcccgagaatgcggccgcgatgcgaaagcggcaggccgcgaatattggacctcaggcgctcggcgatgtcgaagccttcggtgtcgcttataccaggcaacaggacggtgaactcctcgccgccaaaccggtatgcgcgaccggcctcgccaatcgtatcgacaatggtctgggcgacgtagcgcatcacctcgtcgccggcatcgtggccgaactcgtcgttgaagcgcttgaagtgatctatgtcgatcatcatgcagcaaagctgctccatctcgcggtcgcgggcgtgatggttcacgtcctcgtcaagcgagcgcctgttgtaaagccccgtcagcgcgtcgcgaatggaaaggttggtcagcttgtcgcgcagctgcaggttggcggccgccaggccgatattctcggcgatcagctcgagatagagacgcgatgcctccgcctgaatgtggccctgcggtcgctcctcgaaatagagcaagccgacgacatcgccctgcgccgtcagcggtacacaaagccccattgcatcctgatggtcgagatgctggcaactgatgtcgccgtgctcgcgtgaactcgcatgcgggcggccgcgccgcaggccccagcaggccgtggcgggaaacaccggctcggatcgccggggctcgtgccaggaggagatgcgcgacaatgtcgagcggctctcgttcatgatgtagaggttgccggcgagatccggaaagatctgcggggcgaagagcgccacgacttcggccaactcatcctgcgcctgacaggcctgcaggcggtgcatcatctgcaggatcaggtccttcgtctgctgatcgcgccggcgttcggcatccaggcgatcgcgttccaggccgttttcgcggaatatgtggatcgcctcgttcatctcaccgatttcgtcgcggcggcgatcgagcggcacgtcgacggcgtagtcctgcctggcaaggcgggtgacgatgccggtcatccgcatcaacggcatggcgatgcgacgcttgagaataaaatagagaacgctgagaaacacggcggcggtgacagccagaagcgtcttggcgacaaagccccaccagtcgctgcgcttctgcgtgtcctgcatcaccgcctgggtgcgcgcgttcaccaggtcgcggaagcgcgtgacggcgctgagcagggccgtctggatacgctcgtgttccgggccgaacagggcctggcgggcgcctgcctgatcgcccttgcgatagagggcgatggcctcctgctcgatcctgtcgagaacgtcggcgttcttctgcacgtcatcgagcgcctgcagttcgataggcgcggcgcccaactcgcggatgcccttgatcgagcgttcgcgcaggcgctcctcggcttccttgccctggaaggcgctgagatagccgatatcgtcgcgcatgacataaaggcgcgcttcatcggtgcgttcctcggcgcccagcgccaggccgtcggcgagatcgctcagcgccagatgttcctcgaccgcgatccgctcgcggttcgcgctggtggcggaaaggatgaaggcagacccggagaggacggtcagaacaaccgtcgctgcataggcccagttggtgatgacgctgatccgcatgggatgacagtagaccgtccgaattgccagacaattaacacaggttgtatcggttcggccaagctccccagaggtgaggcgcaaaaaggtgattggcggcgggccatcggctgcgctaggactgcacacgaatgccctgcgccggagaaccgcgtgtcgattgccgatatttccctgtttagtgccttgcttgccggtgcactgtcgtttctttcgccctgcgtcttgccgctggtccccccctatctctgttacatggccggcatatccgtcgatcagtttcgcggcggcggaccggtgaccatcgcgccggataagcgccgcagcgtgctgttttcggcgctgttcttcacgcttggattcgcaaccgtcttcgtggcgctcggcgcgggcgcgtcgagcatcggcatggcgctgcgccagcatctcgacctcctctccaagatcggcgggctggtcatcatcgtcatgggcctgaatttcctgggcgtcttccggatcggcctgttgtcgcgggaagcacgcttccagggcaacggcaaaccggcgacgctgacgggcgcctatgtgatggggcttgccttcgccttcggctggacgccgtgcatcggccccgtgctcggcaccatccttggtgtcgcggcctcgcgcgagacggtcggctcgggcgccagcctgcttgcggtctattcgctaggccttgccgttccgttctggatcgccgccgccttttccggcgccttcatgaacttcctcacccgcttccgccgtcacgtcggcacggtcgagaagataatgggcgtgttcctcatcctcaccggcctcgccttcatcttcggattcgtcaccgacgccgcgatctggttccagcagacctttccaatcctgatgaaaatcggctaggccttggcttgtccgcagacaagccgcagtggccgctgcgtctcctgatggcgatgaagtcaggctttcttccgacgtaggtgttccttgatcgcatccgggatcgcgcgcagaccgcgccccggttcgacaccctcgcgcatcaccatgctgcggaacggcgggatggcggccaggacatgcaggccggcggcgcgcagcacctgcatcggcaggaaatcggatagaagcgagcggttcaggacgtcgacgctcgccgtgcgcgtcatgatatcgacgcggcgcttgcgatcgaactggctgcccgcatccttcgagatcggcagttccggccggtcgcagaggatatcggtcagcgccatgacatcgcgcaggctcagattcagcccctgagcgccgatgggcgggaagacgtgggacgcctcgccgatcagcgccaccctgcccttgccggagcggtgtgccatcatgcccgacagcggccagatctgcgcaccgtcttcgacagtcaccttgcccagcagcgattgcatgcgctcctcgacgacattgccaagctcggccagcgaaagctcccggcgcgcttcagcatccgaagggctctgcacccagaccaggctcgagcgcttgccggggagcggcacttgcgtgaagggaccgctttcggtgtggaattcggtggagatgttttcgtgcggcagggaatgctcaaaattcagcaccatggccgactgcggataggaccatttcttgacgtcgataccaaccgtctcgcgcagcttcgacttgcggccatcggcaccgatcgcgaaatcggcggtgagcgtctcgccattgtcgagcgagatggagacggcgtcgtcggtgacatcgatcacatcggcgaaggcggtgaaacgggtgatgttgccctcggcggcggcggccgcttccagcacatccatcaatgccttgttgggaaaattgtagccgaaggcttcgagcccgacttcggcggcgcgaaaggtcgcggtcggcgcgcgcaacaggcggttggtgccgtcgatgatgcgcatggtcgatagcggcgcggaagacggccgcaggcgctcccagagcgtcagccggtcgatgaagcggatcgactgatccatcagcgccgtggtccggcggtcttcccttggtgccggcggcgcaacgagtgcaacgttgcgcccgccgcgtccaagggcgattgcggcgatcattccggccagtccgccaccgatcaccgcgatttcgaaagtcttcattgcaccgttccgcaaattctgaaacggcgagccggccttatgccgccggcttcgcctgacggcgccaactatagctcttgcccggctccgcgtcacgcgcagtcggctgataataatgcggaatctccggcagacgcttttcggtgagacgctttatcgcagtctcgttggtgaccgcgaagctgtcgatgccacagcgcagcatgtgcggcacctggtcgatcaacacatcgccgacggcgcgcagctcgttggtatagccgagacgctcacgtagcagcgatgcatggctgaaggcgcggccgtcgttgaaggccggaaaagccaccgccaccagttcgaggcgatagagatagggctcgagcttgcgcacgtcgtcggcgggcttgatcagcacgccgaagccgacttcgttgctctcctcggccttgaccgccagttcctcgaggctgagcagaggcttatgcccctcacccgccttcacttcctcggtctcgatgacccaagggtcgttctcgacgaagccggtttctctccagatcctggtcattacgcggcctccgccttggaatcaccgtagagcgcatccttgaaaggttgcggaccgacgcgacggtaggcatcgaggaaaatctcggacggatcgttgcgtaggccgagataggtgtcgacgatcttctcgatcgcatccgtcaccttctccggctcgaagccgcggccgatgatttcgccgatcgaggtgtgttcgtcgccggaaccgccgagcgtgatctggtagagctcggcgcccttcttctcgacacccagcagaccgatatggccgacatggtggtggccgcaggcgttgatgcagccggagatcttgatcttcagctcgccgatctcggcctggcgctcggggttgccgaaacgcctggagatttcctgcgcgacagggatcgagcgcgcattggcgagcgcgcagtagtccaagccgggacaggcaatgatgtcggtgatcaggccggcattggcttctgcgagaccaattgcgaccagaccgcgatagacggcttcgaggtcggccagcgccacatgcggaaggatcaggttctgctcgtggctgacgcggatttcgtcgaaggcgtattcctcggcgatatcggcaaccgcgtccatctggctgtcggaagcgtcgcccgggatgccgccgatcggcttcagcgagatcgtgaccatgccgtaatcgggattcttgtgcggctggacgttctggtggacccagcgcgagaacgccggatcggccttcttccagcgggcgagattttcccagccttcggcacgctcaggcaaagccggcggcgcgaaataggcggtgatagcggcaacatcgacttccgggagcttcagctcggtgtccttcaacgccgcgaactcgacctcgacctggcgggccagctcttcggcgcctgtttcgtggacgaggatcttgatgcgggccttgtacttgttgtcgcggcggccgtgcaggttatacacgcgcatgacggcggtcgtgtaggacagcaggtcctcttccggcaggaagtccttgataagcttggcgatcatcggcgtacggccctggccgccgccgacatagacggcaaagccgatctcgcccttgtcgttcttcttcaggtgcaggccgatgtcgtggacctggatcgcggcgcggtcgcgctcggctccggtcacggcaatcttgaacttgcgcggcaggaaggagaactccggatgaacggaagaccactggcgcaggatttcggcataggggcgcggatcggcgacttcatcggcggcggcaccggcgaagtggtcggcggtgacgtttctgatgcagttgcccgaggtctggatcgcatgcatctcgacggtggcaagctcggccagcacgtcgggcatatcggacagtttcggccagttgaactgcaggttctggcgggtggtgaagtggccgtagccgcggtcataggtgcgcgcgacatgggccagcatgcgcatctgcttggagttcagcgtgccgtagggaatggcgatgcgcagcatgtaggcatgcagctgaagatagacgccgttcatcaggcgcagcggcttgaacgcgtcctcggccagctcgccggacagacggcgctcaacctgatcgcggaactgcgcgacgcgctcggcgacaaaggcgtggtcaaattcgtcgtaacggtacatggtattcctcagactgcaatgaatgctggatcggcgggcttgtagcccggcgcgtattccatggtcggaccctgtgcacgaatgcgctcgcgaaggcgcagaggccagagaacaccatcggtctcctgcacgtcaaccacggcgacatcgacgaccagattatcggcataggacttcttgccgatcgcctccagcgcggcgacggcctcggcgtggcgcgcgaccagcgcatcctgcagcgacgtcacccaggtgccgttggcatcgagccagacggcgatgccgtcggtcagcctgttggcggtcagaaccttgtctcccatagtcagctccttagcagttcatcggaccgggcgcgtgcacgcacgagcggttcggacagttcgaaattggcgccggcgacggcgtcgccgatgatgaccatgacaggtccggtgagttcatcgcggttctgcagatcgggcagatcgcgcagcgtgccatgaagcagccggcgatcggcgcggctggcgttctcgatgacggcgaccgtggtttccggcgcgatgccggcacgcatcagccgctcggcaaccgatgcggcaaccgtgcggcccatgtagacggcgatcgtggcgcctgagacggcaaggcttgcccaatcgggaagcacgtcgccggtcaggtcgtggcccgtcgtgaagaccagcgacgaggcgacgccgcgcagcgtcagcggcagctcgaaatcggcggcggcggcgaaagcagacgtaatgcctggaacgacctcgtaggcgataccggcggcgcggagtgcggccatttcctcgccggcgcggccatagaccagcggatcgccagacttcaggcggacgacgcgcttgccctggcgaccgagatagacgagcaggtcgttgatctcttcctgcgacttggaatgacaccccttgcgcttgccgaccgagaggcgctccgcatcgcggcgacccatgtcgacgatttcctgtggcaccaatgcgtcatagacgatgacatcggcttccatcatcacgcgctgggcgcgcagcgtcagcagatcggcggcacccgggccggcgccgaccagccagatacggccctcggccttatcggcggagtgcaacagttcgtcggcgaggtgttgtgcctgcggcatgttttcgttggaaacagcatcggccacggcaccggagaagaagcggcgccagaacagacggcgcgtagcgcccttctcaagagcatgctcgacgcgaccgcgatagctgaccgccaattcggcaaggcgaccgagcgacggcgccagcaactggtcgacctgggcgcggatcatctgcgcgagaacgggccctgctccttccgtgccgatcgcaaccgcgacgggcgcgcgattgacgagtgccggggtgtagaaatcgcagtagtcaggctgatcgacggcattggccgggaccctggcggcgcgcgcggcatcgacgatggcgcgatcggcggcgccatcgcctgttgcggcgaagattagcgttgcgtcctcgacctgttcgggcgcgaagggcgcgcgcacggtctcgatgcggttggcgatcaggtgggcgtgataatcggcctcgggacgatccgcataggcgacgatccgggccttggtgttcgacagaaggcgcaccttggcgaaggcttcatcgccattgccgaagacagccgcgatcttgccttcgacacgaacgaaggcaggaaaaaccgacagttgctcactcttggaaggcatcatcaatccatttcgaagttgccggaatatgcaccacccgaccagccaaatgaagaaacagaaattccaaacccggtatggccgcgtattgttttacccggcatgtcaatgatttgagcaaaactcaccgatgcggcgcgcgtggcacgatgaatcgcgctgcaatgcggcacaaagcctgtgacaaattcgggtgctcccaagaatcctcgtttgcctcgcgcggtaccggcgataaggtgccggcaacaaggagaacgccatgaccgacaccaccattgccgcccgcctgctcgatgtcatggaggcgaatatccttcccttgaccgaacgcggcgtcggcctcggcaacaaggtcttcggcgcggccatcctgcgcaaatcggacctttcgctcgtcgtcgccgagaccaacaacgagctggaaaacccactctggcacggcgaagtgcacacgctgaagcgcttctacgagctggccgaaaagccatccaccaaggacctgatcttcctctcgacgcatgagccctgcaccatgtgcatgtcggcgatcacctgggccgggttcgacaatttctactatttcttcagccacgaggattcccgcgacgccttcgcgatcccgcacgatttgaagatcctgaaggaagtgttcgggctcgagcccggcggctaccgtcgcagcaacgccttctggaacagcttcgccatcgccgatctagtcgagaccgagagtgatgccagaaaggccgaactcaaagcgcagacggcgcggatcaaggggcgctacgacgcgctttccgaaagctaccagtcgtccaagggcgacaacgacatcccgttgaactgacgcgagcgaccagaacacgatggaagcctccaaagacatttcccgcctgatcgagatcatggccgcccttcgcaatcccgagaccggttgcccctgggacatcgtccagaccttcgagacgatcacgccctacacgatcgaggaggcctacgaggtctccgacgcgatcgagcgcaacgatatggacgacctctgcgacgaattgggcgacctgttgctgcaggtcgtgttccatgcccgcatggccgaggaggccggcgcgttttcgttcggcgacgtggtcgaagcgatcacgcgaaagatgatccgccgccatccgcatgtcttcgcccgctccgaggcggatacgcccgacgcggtgaaaaagcagtgggacgacatcaagcaggcggaaaagcgcgagcgcgccgagcgacgggccgcgcgcgggatttcagaggatttcaaggcaggttttcttggctccgtgcagcgcagctttccggcgctgacggaagcgctgaagctgcaggaacgcgccgccaaggtcggcttcgactggtcggcgccggagcccattctcgacaagatcgaggaggaaatcgcggaattgagggaggcgttggcctcgggcgaccacgccaaggtcagcgacgaactcggcgacctgatcttcgccgtggtcaatatcggccggcatgtgaaggccgatccggagcaatccttgcgtgggacgaacacgaaattcagatgccgtttcagtcatatagaaacgtctcttgaagcggaaggtgaaacgctggaggccgcgacgctggagcggatggaagaactctggcaggccgccaaggccattgagcggcagctgggctgactgggcacgtcatgaagcttgaaacgctcgacatcgcgatcgcaggcgccggcgttggcggtctttcgttggccgcccttctggcaggccgcggcgcccgcgtgaccgtctatgaccagatgaacgcgccgcagccggttggctccggattcgtgctgcagccgacaggggctgcggtgctctcgcgcatgggcctgcttgggcaagtcgaggcgcgcggcgcccgcatcagccggatgcatgggcgcctgtccggcaatggccgcaccgtgctcgacgtcggctatcgcccgggcgcctacggtatcgccatccagcgtgtcgcactgttcgatcttctgctcgcagcggcgatcaatgccggtgtgcggttcgagacatcatcgcgggtcactgacatcgagccaggtagcgcgccgcgtctcgtgcttgcgaccggcgcccggacggcgaccgccgatctcgctatcgacgccatgggcgccaactcgccggtcgccgcgaaggccgccaccgagctcggctacggcgcgctatgggcgacggttccctggccggagcacgacgttttccgtaaggacgagctcgagcaacgctacaagagagcaagccagatggccggtgtgctgcctgtcggcacggcacgcgatggcgcggctccgatggcgacgttcttctggagcatccgcaacaaggatttcgaggcatggcgggctgccgggcgcgaggcctggatcgatgcggtgcgttccttctggcctgaggcggaggcgctagccgccgcggccgagccggtgcacgcgcgctaccggcatctgacccgcacgccggttgccggcaagaacgtcgtgaagatcggcgacgcctggcacgcaacgagccctcagcttggccagggcgctaatatggcgctgctcgacgcagcgtcactcgcttccgcgctctcccgtgaggcaacggttggcgaggcgatcgtgcgccatctgcagcagcggcagatgcatatccacttctatcagctgctcagccgtatcctgacgcccttctatcaatcggacagttcagtgctgcctttcagccgcgacatcatgattggcccggcgaccaagctgccgctggtgcgtaacctgatcaccacgctggtcacaggcgagttgcttgatccggttggacggatcgacctcgatcggctcgtgtcggaggaaaaagtcgcggcgaaggatcagggtgcgctggtctagccgcgcgcgacgactgaataacggggcgcctgatcagcgctcccagtcttccttcggccttgccgtattgccaagccggcgctcgagttcgacggcttccgtttcagacagcctgagatcgagcgtcaccgatccgtcctcattgtcttcgcggctgtcgacgatggcgtgatcgtaaagccatggcagcaaggccagcttgtcgaccgggagcacgacggtcgtctccgtcaacacgccggacagcctgcggctgatttcttccatcagcgcatcgacgccctcgcccgtcacggcggagaccgccacgacattgcgggcgccttcggccttctggacgatcgcttcgtggttttccggctcgaggcggtcgatcttgttccagacctcgatgatgcgcttctcgccctcggcctcatcgatgccgagatccttcaggatgcggagcacgtcggcgctctgcgcctggttgtcgtcgtcggccatgtcgcggacatgcagaacgaggtccgcctccagcacttcttccagcgtcgcgcggaaggcggcgacaaggtgggtcgggaggtcggagatgaagccgacggtatccgacaggatgacggtgcggccatgcggcagcttcatgcggcgcagcgtcggatcgagcgtcgcaaacagcatgtcttcggcgagaacgccggcgccggtgatgcggttgaacagcgtcgacttgccggcgttggtgtagccgaccagcgccacgatcggatgcggcaccttgcggcgcttggcgcgatggagctggcgggtacggaccacctgttccagctcgcgctcgagcttgatgatgcggtcctgcagcatgcggcggtcggcttcgatctgggtctcacccggaccacccatgaagccaccgccaccgcgctggcgctcaaggtgggtccagctgcgaaccagccggcccttctggtagttgagatgcgcgagatcgacctgcagcgtgccttccttggtggaggcgcggcggccgaagatttcaagaatgaggcccgtgcggtcgatgaccttggcgttccattccttttcgagattgcgctgctgaaccggcgtcagcggatgatcgacgatgacgaggccggaatcggtctcgtcaaggctgtccttgatctcctggatcttgccggtgcccatcagcgtcgccggacgcggctcgctgacggtgacgatggtacccttgaccacatcgagatcgatcgcctgcgccaggcccgtcgcctcttcgaggcggctttccggcgtacgggtcgtggtgacggtgtcggcaccgccgcggctgccgcgtgcctgcttgagcacgggcacgacgacggtcgcgcgcatgtcatcccggtgcttcatggcttccgggatgatcgaatcattcttggtatcgcgtgtcgagatgacgtctgtcctgtcaggaagcggattcttcgctttcgaacatctgcatcggctggccgggcatgatggtcgagatcgcgtgcttatacacgagttgcgaatggccgtcacggcgcagcagaacgcagaagttgtcgaacgacgtaacaacgccggtcagcttcacaccgttaatcagaaatatagtcagggaaatcttttgcttgcgaacagtattgagaaataagtcctgcaggttttgagaacgttccgccatcgcgccgattctttctttattgccggccttcacgtgccggtaaaatacttcttatttttccatcaggcagccgacaaccctcatccctgctgcccggaaagcccttggtatcaaatcgcaatcttttccgcaacggcgaaaaaggcccgtctaattttatggacgccggatcgccgccaagcgccgccagcaccctgcccgccgaccacaaacgcacgccggctaccgatcacacctgtcgtcagacgccgagcgacttcaacttgcggtgcaatgccgagcgctccatgccgacaaactcggcggtgcgcgagatattgccgccgaatcgattgatctgcgcgatgagataatccttctcgaacatctcgcgcgcttcgcgcagcggcagcgtcatgatgtggtagtcgttcttcgccgataccttgggcagcatgtcgccaaggtcggtcggcagcatctcggcggtgatcggcgcatccgggccgtcggaccgggcgagaatcatcaggcgttcgatgttgttgcgcagctggcggatattgcccggccagtcgtgcgcctgcagcaccgccatggcgtcgtcgccgatgcggcgcgggcgaatgccggcctgttcggagatctggcgcatcaactgatcgacgaggaacgggatatcctcgcgacgctcggccaaggacggcaccttgaccggcaccacggcaaggcggtgatagagatcctcgcggaaccagccttcggcgatgcggctttccagattataggcggtggacgagacgatgcgcacgtcgaccttcacccgctttgagccgccgacgcgctcgaactgctgatcgacgagcacgcgcaggatcttgttctgcgtctcgcgcggcatttcgccgacttcatcaagatagagaatgccgcgatgggcttcctcgagcgcgccgatcttgcgggcctgaccgggcgaaccctcggtcccgaagagcgccacttccatgcggtcgggcgtgatgttggcggcgttgatggccacgaacgggccactcgcgcgcgacgacttcttgtggatcatccgcgcgaccagctccttgccggagccggaggagccgaggatcatgatgcggctgttggtcggcgagaccttctcgatcgtctggcgcagctgcgagacggcaacggacgtgccgatcagctcgaccggatcgccggccttgcgcttcaattcggaaacttcgcgcttgagcttggagttttccagcgcacgctcggcgatcaggatcaggcgatcggccttgaagggcttctcgatgaaatcgaaggcgccgcgcttgatggcggagacggcggtctcgacgttgccgtggccggagatcatgacgacgggaatgtcgggatggcgcgccttgacctcatccagcagcgccagaccatcgagcttgctgccctgcatccagatatcgaggaagatcagccgcggcgcgcggtcggaaatcgcggccagggcgctgtcgctgtcatgggcggtgcgggtctcgtggccctcgtcggagagaatgccggagacgatctcgcggatgtcgtgttcgtcgtcgacgaccagaatgtcagaggccatatgcattttccttgtcacttgcggccgaggcggcgggcgtctgctccaggcgcggcagatgcacgcggatcatggcccctcttccctggtcaaaatcagcgggtgcgtcatgcagttcgagctgcccgccatgttcttcaataatcttcttcacgatggcgaggccgagaccggtccccttctcgcgcatcgtcatatacggctccagaatgctgtgccggttctcgacaggcagaccgcggccattgtcgatgatatcgacggtgaaccggtcacgcggctgatcgagcgatgcgcgcaccagcaccttgcgttcctcgcgttcaccggccggcacgccctcgatcgcttcaaccgcgttcttgatgaggttgccgaaggcctggcccagcatgcggctgtcgaactgtccttcgagcggcgcatcgccgaactcctgcaggaactcgacatggctgttgcccatctcgcgcaggaagaccgcgtcgtgcaggatcttgcgcagatcgctcggctccttggtgggcttgggcatgcgcgcgaaagaggagaactcgtcgaccatgcggccgatatcgccgacctgacggatgatcgtttcggtgcactgatcgaagacgccgcgatcatcctggttgatctgcttgccgtagcgacgctggatgcgttcggccgacagctggatgggggtgagcgggttcttgatctcgtgagcgatacggcgcgccacgtcgccccaggcggttgagcgctgtgcgatgacgagatcggtgatgtcgtcgagcgtgatgacgtaggattcgctcatgtcgcgcacttcctcgcgcgtcacctggacgctcagcgtgcgcacggtgccggcgcgcacgagcgcgatctgcttgcggaaatcgccgcgatagcgcgaggccgcctcggtcagaacctggtccacctcgggggcgatttcggagagctgcttgccgagcatgtcacccgcgtcaagcgccatcagcgtctcggccgaactgttgacgatagtgacgcggcgatcatgctcgacgccgatgacggcggcggtgacgcccgacagcacggcttcgatgaagcggcggcggtcgtccacctcgtccttggcttcgaggatctcgtcgcgctgggtgcggatctcggagatcatcttgttgaaggtgcgcgacaggttggcgacgtcgccatcgacggcgtgcacgggcacgacgatgtccatgttgcctgatgcgacgctatccgcggcagtgatcagcaggcggatcggccggacgatacggtcggcgacggcgatcgcggtccagatggccgcgagcaatacgatcagcgcgaaaccgacgtagaggatagcaaaggcgatctgcagcgagaagcgccccgcctccatcgacttatattcggtggcgttctcctccatcatccgcatcgcggtcatgaccttcgggtccaccgcgcgtaccgtatagaggaaggcgccgtcgatggattccagccggatgatggcgccgacaagattcgtaacgcctggcgggatcagtgtcggctggccggccgaggccttattgagcgcgtcctgcgggatcgccggcagcggtttctcggtcttgatatcggcctgcgtgatcacagtaccgtcagcctggaccaggaaggcgccgagcaggccgcgtcccctcgcctggcgtgtcatcagttcggcgaagcccgttcgatccagattgaacagctggcgattgcgctccaggtcgtttgccatggagaccgtctggccctgcagatagctcgcattctccatcatgtaggcctgcccgatattgcgggaggaactgacgatcgattgcgtcctcagcgcgaaccagcggtcgagaccggcgttcagcgtgatactggcgaagagagcgacgaggatggcgggcgtgatcgccacgatcgagaacaggacgacaatgcggatatgcagccgtgcggcggcgcgaccgcgcttgcgcgccttcaacagtcgcgagacctcgcggccgatcagcgccatcagaccgagcacgaagaaggaattgacgacgaccgaggtgatgacgacgggcgacgtcggcgcgatcggcgtcaggccgagcagcacgaagagcgtcatcgtggcgcagagaagcgcgcccccggcaaggaccagaccgggcagagcaaacagcgcgcggcgatccgttaccgtggtaactgcttcgccatccgccgccggcggcaacgcatcctcgttcattcgtttaactctccacgcggtgaaacgtatttcaccgccgtccatgggtcagttatgaagaccgcgctcgatctcccgctcgtgcatcgtcgagccggatcatcggacgcagaactgaccgcaggaacacaaaccccttgcgtgacttattggcaacgcaatgtggcgaaaatgcaacgcatcgcgtcacattgtcaagccatgcagggtcaagccatgcggcttcaagcggtgcgagagcttctgtagaccgatacgccgagttcgcggatcttcttgcgcagcgtattgcggttgagaccgagcagatcggctgccttgatctggttgccgcgcgtggccgtcagcgctgccaggatgagaggatactccatctcggtcaaaacgcggtcataaaggcccggaggcggcagattgtcgccgaaagtcgcgaaataggaccgcatgttttcctctacggcctgggcaatggtcatgttgccattgcggatcggacccttctcgatcgggctgtcgggcacgtcggaacggagttcggactcgatgatctcgcgggtgatcacatcctgtggataaagtgccatgaggcggcggatcaggttctccagctcgcgcacgttgcccggccaggcataagccttcatcagatcgagcgcttcctgatcaaaacgcttggtgccgaggccttccttctccgcctgctggatgaagtgacggacgagatccgggatgtcctcggcgcgatcgcgcagcggcggcaggcgcagcggcacgacgttgaggcggtagtacagatcctcgcggaagaggccctggttgatcgcctgcttcagatccttgttggtggcggcaacgatgcgcacgtcggtgcggatcggggtgcggccgccgacggtggtgtattcgccctgctgcagcacgcgcagcaggcgcgtctgcgcatccatcggcatgtcgccgatctcgtcgaggaacagcgtgccgccctcggcctgctcgaagcggccggtggagcgggtctgcgcaccggtgaaggcacccttctcatggccgaacagctcggattcgatcaggtcgcgcgggatcgcggccatgttgatggcgacgaaggggccgttgcggcgcttgccgtaatcgtgcagcgcgcgggcgacgagctccttgccggtgccggattcgccggtgatcatcagcgtcaggtcggtcagcatcaggcgcgccaggacgcgatagatttcctgcatggcggccgagcggccaaccagcggcatgccgtcctgcacgtcgtcctcgaccttcgccggcttgcgcttcggctccgacagcgcgcggccgatgatgccgatcagctcggtcagatcgaagggcttggggagataatcgtaggcgcccttctccgaggccttgatcgccgtcatgaacgtattctgcgcgctcatgaccagcacggggagatccggacgggccttcttgatgcgcggaagcaggtcgaaggcattctcgtcgggcatgacgacgtcggtgaccacgaggtcgccctcgccggccgaaacccagcgccacagggtggccgcgttcgaggtgatacgcacgtcatatccggcgcggctcaaggcctgattaagcaccgtacgaattgccgcatcatcatccgcgacgaggatcgttgctgtcatcgagagggtcctgtggaggttatggttgcgtcctcaagcgatgcgtccttggaggcaggcatgagcacgcggaatgtggttttgttggtctggctgtcgcattcgatgatgccgccatgatcaccgatgatcttggcgaccagcgcgaggccgaggccgctgccattggtcttggtggtgatgaacgggtcgaacagatgcggcagcaggtccgccggcacgcccggaccgttgtcctgcacgcagaattccagcggcagcgagaccttctcgcgggttcctgcgaccgaaaggcggatgccgggacgataggcggtcgtcagcacgacctcgccatccggccggtcgccgatcgcctcggcagcgttcttgacgagattgaggaagacctgcaccagctggtcgcggttggcgtaaaccgatggcagcgacgggtcgtagttctcggtgatcttgatgtgacgcgcaaagcctgccctggccaccgccttcacatgatcgagcacggaatggatgttcacgggcacacggtcgacggggcgctcgtcggagaagacctccatgcggtcgaccagcgaaacgatccggtcggtctcgtcgcagatcagccttgtcagcgcgcggtcatcgtcggtcgccgagtgttcgagcagctgggcggcgccgcgaatgcccgagagcgggttcttgatctcgtgcgccagcatcgaggcgagaccggtgaccgaacgggcggcggcgcggtgcgtcagctgccggtcgatcttgtcggccatcgagcgttcctggaagacgatgacgacggagcccggctcgctcgtcaccggcgcgacgtagatgtcgacgagcttgtcctggccgagcctcggcgaactcagatcgacacgatactcgttgatcggcgcgcggcgctcgcgtacctggtcgatcagggccagtagcgggctgccgaagggaatgaaggtcgagatcttgtaacgcgccagatgcgaggcgctggccccgaagaaggcttccgcctcccagttggcaaaggccacaagcccggcatcatcgaccatgatgacggggttctggatggcgttgagaacggccatggcgacggcactgccggcatgggcagatgatagcgacgcgtcgtttgtcatgcagcctcccgggcatctgtattgtctgccgccgcgaccagggcatcgtggaatcgttgcgaaacctcgcgaggatcgcgcgtggtcatgatcgccgccttgtcgtttgccgataccgagggtgcgaagcgctccatataccagccaagatgcttgcgagcatgacgaacgccgaccgtttcgccgtaaaaatcgagcatcatgcgataatgttcgaccgcgatatcggcgatctcccatggctgaggcgcatcggcgccggcgagcacgcccgcatgccacgggcgtccctggcagccacggccgatcatcacggcatcggcgcccgagcggcgcaggatttcatgggcatcctcgaccgtttcgacgtcaccattggcgaccagtgggatggtgaggacatcgcgcacggcgcggatcgcgtcccaatcggcgcgtccctcgtaaaactgcatgcgcgtacggccgtggatcgtcaccagctggacgccggcctcctgggcacgctttgcgatttcgggggcgttgatcgaattttcgtcccagccaagccgcatcttgagcgtgacgggaacatcgaccgccttgaccgtcgcctcgataaggccgagcgcgtgatccggatcgcgcatcagcgccgagccggaatagccgccgatcaccttcttggccgggcagcccatgttgatatcgatgatatcggcaccgtgcgcggcggcgatcttcgcgccctccgccatccagtgcgcttcgcgaccggcaagctgcaccatgtgcggattgaagcccgcggtcttcagccgcacccaggattgttcggtgtcgttgacgagctcgcggcttgccaccatctcggtcaccaccagtcccgcgccatggcgccaggccaattgacggaacggcatatcggtgacgccggacatgggcgccagcacgatacggttgcgcaccgcaacggttccgatgcacaaaggagatgcgaggtgtatgtcagacaactgattatctttcaggcacgctaagcaggtgcactatttttagacagatttaaaagacttgccaagggggaagtgcccgaattgatatttttcgggcaaatgctggaattcggtgcgccgagccgttagagcacccccagaaattctgctttttggggatttatgccgcaaatgcatcaaaagcaaccgatatcaatcggaattatcgtggtggccgcaggccggggcgagcgcgccggcgcatccgttgaaggcccaaagcaatatcgccggatcggtggccggcccgtcattgcccacacgctcgaaattttcgcgacatggcctcaaacgaccgagatcgtcgccgtgattcacgccgatgatgaggcgctgtttgcgaaggcaaccgctggtgtcacgtccgggctgccgatcgcgacagtgcatggtggctcgacgcgccaacagtcggtactcgcggggctttggcatctgaaggacaagggtatcactcacgtgatgatccacgacgccgtgcggccgttcttcgatcatgatctgctcaaccgcgtcgcggccacccttgctgaggccgcgcctgccgtgctgccggccatgccggtcgccgatacgctgaagcgtgccgatcaatccggcatcgtggtcgagactgtcccccgcgcgcagctctatgccgcgcagacaccgcaatccttcgacttcggcatcatccttgccgcgcatgagaaggcggccgccgccgatcgcaccgatttcaccgacgatgcggcgatcgccgaatgggccggccatcccgtgacgatcgtcgagggcatggccgacaatgtaaaactgacagtgaggcgcgatatcgcaatggccgatcagagactttccagcacacgccttcccgatgtgcgcaccggcaacggctacgacgtgcaccagctggaggccggcgatggtgttacgctctgcggcgtgttcattccgcacgaccagaagctcaagggccactcagacgccgacgtcgcgctgcatgcgctgacggacgcgctgcttgccacctgtggcgccggcgatatcggtgaccacttcccgccgtcagaccagcaatggaagggcgcgccgtcgcgcatcttcatcgagcatgcggccaagatcgtgcgtgagcgcggcggcaccatcatgaacgccgacgtgacgctgatcgccgaggcaccgaaggtcgggccgcaccgcgacacgatgcgcgccatgctttcggaattcctcggcatctcgatcgaccgctgctcggtcaaggcgacgaccaacgagaccatcggcttcgtcggccgccgcgaggggatcgccgccatcgccaccgccaccgtcgtctatcaggaaatcgcccaatgagcctgtttcccgctgatatcctgtccgaggccgaagccattgtcaggacattcggggcggcggggttgatggtgtcgacggcggaatcatgcaccggcgggctgatcgccggcgcgctcacggaaatcgccggttcgtcagcggtcgtcgaccgcggcttcgtcacctatacgaacaccgcgaagatggagatgctgggcgtccaggaagcgacgcttgcgcgtttcggcgcggtgtcagaggagacggcgcggcagatggtgcatggcgccctcttccgctcgcgggcatcgatcgcggtcgcggtcacgggcattgccgggccaggcggcggatcggcggaaaagcctgttggcctcgtgcatctcgccgccaagtcacgcaacggtgacctcattcacaacaagatgctttatggcgatatcggtcgtggcgcggttcgtctcgccaccgtcaggacggcgctggcgatgatccggcagctcgggccgcagtaagccggatcagctgtagatcttgcctgcgcgcgtttcgaaggcttcggtgaacattcgaaaggcgcggtcgaacatcgagcccatgagggcgccgaggatgcggctcttgaactcgtagtcgatgaagaagtgcacgttggagcccgacggggtgtcttcgaagcgccagcgattgtcgagatacttgaaggggccgtcgatgtatttgacgtcgatgacgcgctcggccttgttgagcagcacctgcgtcgtgaaggtctcgcggatcgccttgtaaccgaccgtcatgtcggcgatgagcagaaccttgccatcgcgctccttgcggctgcggatcgcaagcccttcgcatagcggcaggaattgcgggtatttctcgacatcggcaacgagatcgaacatctggtctgcggaatgcgggacggggcggtgcgtttcgaactgaggcatgagccgcagttaagcgggcgcgccaagaagatcaagaaggcggcgcatttcccggtgcgatttcaactgaaggacgggcacatcgggcttgtgtcgctcgatccccgcgatgatgagcggcgcccagcgttgctcgaagttccagatgtaggtcaggaactcgccatccagcttttccgggcaacccggcgccatctccggccgcgccttgccccgccagcgaaaccaccttgtggtgacaccgagcagacaacgccagcgcggcagccgcacccagagcaccacatcggtgcgcggcatcctgagatcgaaggtcgaggcgccggtgccgtccatcagccaccgctcttcggcaacggccgccgcgatcatctcgcgctcctcggccttgggtcgcttcacccagcccggcagccaatagaagtcgcggtccatcgaaatatgccgcacgccgagccgctccccaagccgtctcgacagcgtggtcttgccgccgccagagcagccgatcacgagaatgcggtcggcgcggctgacgaggtccgcggcactggagatatcggtgacgaaattcggcatgtctttccctcccgcaagcaaagaccgaaccaggccatcaacctagccgatggcttcgaggcgctgaagcagctgtcccatctgcgccctgctccccaattcgacgagcgggacgtcaggcccatgcaggcggatgccttccatgaattcgggcacgtcgtcccgctcgaaattccagacataggagatgaactcccggtccggccacttttccgtgcatccgggcgccatgtcgggccgtgtcctgccgcgatggacgatgccgcgcttgaagatgctccaaaggcagagccagcgcgacacccgcacccacaggatcacatcggcgcgcggcagcctgagatcgagcgttctcgggttgttgccatcgatgatccagcggtcttcagcgacgatcctggcgatgatctcgcgttgctccggcctcggcctcgagacccatcctgaaagccagaacacctcgcggtccatggagacgtagcgaacaccgaggagccgcgccagcttctgcgccagcgtgctcttgccgccacctgatgagccgaagatgacgatgcggtcggcacgcttcaggagttcggccgcctcatcaaggccagtgacgttcagccgatgcttcggttgttgcaacactatggcctcttgtctgattgcggggaagatcaggccgcctcgacgggtatggaaggctggaccgagattatgcctgccagttctcgtggccatggcgcacgcggatgatgagaatgccaccatcacccaactcatggtagacgatcaagtgagcgccgcaaggatgtatcctacgggaggcgtaatttcttggcgaagccgcgcgagtttcgggttgtccgcgagtatttcgaagatatcgcccaaatgacggtgatagctgtcggcttgcgcttttccaaaaagccgaaggcccgtcgcgtgaatattacgaatatcatgagcggcctgacgcgacagccggtagctcatgagacctattccgccgcttcgttgagcgaccgcagaatgtcatccatgctttcgtcggatacgccgctcgccagcccttcatcgacgagagcctgcatatgggctatcttaatcgcacgctcctgatcgcggcgaacgagatcgcggacgtagtcggaggcatcggcatagcggccggcagcagcctgcttttccagccaggccttcatctcatccggcaccgtcactgttaacacgggcatgacgtgttcctccgttgcattgcctgctgccaatcatggcacagcaagcgacacaagagaaccgctctactccgcggccaccagcagcttcttctcacgcgccgcgcgcaggcgggcgaagtcgtcgccggcgtggtgcgaggagcgggtcagcgggctggaagccaccatcaggaagcccttggtgtaggcgaccgtttcgtaggacttgaactcctcgggcgtgacgtagctcatgacggcgtggtgcttgcgggtcggctgcaggtactggccgatcgtcaggaagtcgacgtcggcgacgcgcagatcgtccatcagctgcagcacttcgttgcgctcctcgccgaggcccaccatgatgcccgacttggtgaacatggtcggatccagttccttcacccgctgcagcaggcgaacggagtggaagtagcgcgcgcccgggcggaccgtgagatagttgcccggcacggtttccatgttgtggttgaagacgtcgggcttggcggcgacgacgcgttccagggcaccgggcttcttcaggaagtcgggcgtcaggatttcgatcgtcgtcgtcggcgatgcggcacggatcgcccagatcaccttctcgaagtgctcggcgccgccgtcttccagatcgtcgcggtcaaccgaggtgatgaccacgtggctgaggcccatctccttgaccgccttcgccacgctgtcgggctcggccatgtcgagcgcgttcggcttgccggtcgcgacgttgcagaaggaacaggcgcgcgtacagatctcgcccatgatcatgaaggtggcgtgcttcttgtcccagcactcgccgatattcgggcagccggcttcctcgcagacggtgacgagcttgtgctccttcacgatcgagcgggtttcggcgtagcccttggaggtcggcgccttgacgcggatccagtccggcttgcgcatgacctcggtatccggccgatgcgccttttccgggtgccgcacgcgcttttcagcgtttggattgatcctgtcgagaatagttaccatcaataacctgccttcaaaccgccggaagcggcctccttcgtcagcgtctgacgagttttgccagaaatagcaagatacaagagccgatgaaacccgtcacaaggtaacccagccaaccgctggcgacatagatcccggcacgggtgaagatcgcgctgccgatgacggcaccgacgatgccaatgacgatgttcatcaaaacgccgaagcgtatgcccatcaagatgcccgcgagccagcccgccaagccgccgacgatgatcgccgtaatccagcccacaccttccatccagtcctatcccctcaagctatcgcccttgcgatcagcaccacgatgatggcgccgaccgtggcatgaatgatctgcacgacgagcgcattgtctatgcccaggttgatccccagcgcgttgaagagaaagcctccgacgaacgcgccgatgatgccgctgagcaggcaccgtatcaatccgcctccgccaacgatcaggctggcgaggaacccggcgaccagaccgatcaggaggaagatgacgagtgcctgcgtacccatagacatgatgatttcctttcgctttttccagtccgtgattgaacgtggttcaatccgtcatagagagccgcgaagaaaattatcaagcgttgaggacgcgaccataagcatccagaaccgcttccttcatggtttcggaaaccgtcggatgcgggaagatggtgtgcatcagttcttcttcggtcgtttccaggttcatggcgacgacgaagccctggatgagttcggtgacttcggcgccgaccatatgcgcgccgagcagctcgccggtcttcttgtcgaagatcaccttgcagaggccctggtcctcgccgagcgcgatcgccttgccgttggcggcgaaggagaagcgaccgacgcggatgtcgcggccggcttccttggccttggcttccgtcaggccgacggaggcgacctgcgggttgcagtaggtgcagcccgggaccttgctcttgtcggtggcgtgaacattcggcaggccggcgatcttgtcgacgcagacgacgccttcgtgctcggccttgtgggcgagcatcggcgggccggcgacgtcgccgatggcatagatgcccgatacgttggtcttgccgtagccgtcgatgacgacacagccgcggtcggtcttgacgccgacggcttcgaggccgaggttttcgatgttgccctggacgccaacggccgagatcatgcggtcggcggtgatctgctggaccttgccgtcagccgtctcgacgtgcgcggtgaggctatcagcggccttttcgaccttggtgatcttggcgctggtgaggatcttcatgccgcgcttctcgagctgcttgcgcgcgatcgcggtgacttcgacgtcctcgaccggcatgatcgtcggcatgacttcgacgaccgtgacgtcgacgcccatcgagcggtagaagctcgcgaactcgatgccgatggcgcccgagcccatgacgatcagcgacttcggcagggcagccggcttcatcgcttcgaaataggtccagatcagcttgccatccggctcgatgcccggcagcgcgcgcgggcgggcgccggttgcgatgatgatgtgcttggcggtgtaggtgccctcgcccttgatgttcttcggaaccgggttctgcggctcgacgacgggcttggaggacttgcccacgacgatctcgcccggctttgtgatcttggcttcgccccagatcacatcgaccttgttcttcttcatcaggaagccgacgccgccgttcaagcgggcggagacaccgcgcgagcgggcgacgacggctttcacgtcagcgctcatcttgccctcaagcacgaggccgtagtccttggcgtggttggcgtggtcgaggatctcggccgagcgcagcagcgccttggtcgggatgcagccccagttcaggcagatgccgcccaggtgctcgcgttcgacgatcgcggtcttgagaccgagctggctggcgcgcacagcggccacatagccgccgggaccggagccgatgatgatgacgtcgtaattctcagccattttttcctgcctttgttatcgggcgtcgcgggtgagaagcacccactcgtgtttcctgctgctttcgaaaagagacatcgccttctggcgcgccgcttccgaaaatccattcttcttgtaaagcgacaaagccgcttcattgtcacttgcggtgatcagactgaccggcagcgaccctgccctgtcgatctgatccttcagtatgtccctgccgatcccgatgccgcgcagatggcggtagacgccgagcgttgcgatgaaccagctgccaacaaccatcttctgcagatcgatcaccggctgcaaagccacgcgatcgacttccatcttctttacgtcctcgcccagcgcgtagccgatcgccgcgcccgccgtttccccgtaagcctcggccagcaccgcatggcgccatgtgccgtagccgtcgtcccgacgcatcttcagccggccaagctccatcggcgtgtcgctgccggtgccatcaagctcgcccagccaaagccaggaggcgaaaccatgcgaggcgatgtccgagaggatcgccagttcggccgcgtcatcccgcgtggcgggacggagcgtcacgaaagacgccacggtcaaagccccaacatcatccgcacggtcgattccatgccgcgcccgagagcgcgggtgttctcggcgtcgagatggataccgtcgagcggcgtcgtcctggcgaccgaattggcgtcgaagaaaccgcagccgagctcgtcggcgagatcccggtagagcgtcgccagcatcgccgattcctcgatgccgccgacgaaggaggccgcgaagggcacgttggccgtctcgcagatcctcggcggcgcgacgatcaggatgtccggcacctcgaaatcgaacggccaggcgtggttgcggatcagccgcaccagccgggcgatgccctggcatgcggcgaaggccgatccggccacgacattcttcatgtcgttggtgccgagcagcagaatgacgagatcgagcggcgcatgcgtctgcagaatggtcggcaagacgcgggcgccgttgcggtcgcaatcggcgagatggtcgtcgaaggcggtcgtgcggccgttcaatccctcggcgatgaccctgacctcgttgccgagcgccacttgcagcgcactcggccaacgatccttgtagtcatgacggccgacggaagcggcatcataaccccaggtcagactatcaccatagcaaagaacggtcttcgtcatttccgcctccgccgctttatcagacgagcatgcccatcgggttttcgatgtagcccttgaacgcctgcaagagctccgcgcccaacgcgccatcgacgcagcgatggtcggtcgagagcgtgaccgtcatcacggtggcgacagcgagctcgccgttcttcacgacagggcgctgctcgcccgcgccgaccgcgagtatcgttgcgtgcggcggattgatcacggctgcgaagtgcttgacgcccatcatgcccatgttggagaccgacgtggtgccgccctgatattcctcgggcttcagcttgcggtccttggcacgcttgccgagatcgcgcatctcgttggagatggccgacagggtcttttcctcggccttgcggatgatcggggtgatcaggccgccggggatcgagacagcaacgccgacatcggcgtgcttgtgcttgaccatgttggattcggtccaggacacgttggcatccggaacgtcgcgcagcgcaagcgccatggccttgatgaccatgtcgttgaccgacagcttgtaggccggcgcgctatccttgcggggagcggcgtcgttgagctgggcgcgcagcgccagcagcgcatcgagctcgcaatcgacgctgacgtagaagtgcggcacggtctgcttggattcgacaaggcgcttggcaatgaccttgcgcatgccgtcatgcggcacgagttcgtaggaacccggttcgaacagcttgagaacggtctcgtcggatgcgcccttcggcgctgcggcaggagccgatgcggcagcctgcggagcagcggcagatgcagccttggcgccaccaccggcaacggcggcttcgacgtcgctcttgacgacgcggccatgcgggccggagcctgcaacggctgcgagatcgataccggcttccttcgccagacgacgcgcgagcggcgaggagaaggtgcggttgccgcttgtcgacgcagcggcaggtgccgcagccggtgccggggcagaagcaggggctgcggccggagccggagcggcttcggtcttcgcctcggccttcggcgtttcggcagccttcggtgccggcgcagcggagcctgcgccgcttgcggcggcagcgacgtcttcgccatcggcggccagaacggcgatcaaggcattgaccttgacgccttcggtgccggcgggaacgacgagcttggcgacgacaccttcgtcgaccgcttcgacttccatcgtcgccttgtcggtttcgatctcggcgatgacatcgccggacttaaccgtatcgccttccttgaccagccacttggcgaggttgccctcttccatggtcggagacagggcaggcatcgtgatgttgataggcatcgaaatacccttcccttgttacttgtagcaaacagccttcacggcatcgacgacttcggcgacactcggaagcgcaagcttttcgaggttggcggcgtaaggcatcggaacgtccttgccggcgatcgtgagaaccggcgcatcgagataatcgaaggcctgctgcatgacgcgggtggcgatttcggtgccgacagagttctgcgggtagccttcctcgacggtgacgagacggccggtcttcttgaccgattcgatcacggtcggcaggtccatcggacgcagggtgcgcaggtcgatcagttcggcgtcgatgccgatcttctcgagttcggcgacggccttggtggcgtaggtcatgccgatgccgaaggagacgatcgtgacgtccttgcccggacggtggatgcgtgccttgccgatcgggagaacgaagtcatccatcttcggcacatcgaaatgctgaccgtagaggatttcgttttcaaggaagacgaccgggttcggatcgcggatcgcggccttgagcaggcccttggcgtcggatgccgtgtagggcatgacgaccttgaggcccgggatctggctgtaccacgaagcgtagtcctggctgtgctgggcgccgacacgggcagcggcaccgttcgggccacgaaacacgatcggagcgcccatctggccgccggacatgtagagcgtcttggcagcggagttgatgatctggtcgatcgcctgcatggcgaagttgaaggtcatgaactcgacgatcggcttcaggccggccatcgcggcaccgacgccgacgccggcgaagccgtgctcggtgatcggggtgtcgatgacgcggcgagcgccgaattcctgcagcagaccctgggtgaccttgtaggcgccctggtattcggccacttcctcgcccatgacgaagacgttgtcgtcggcgcgcatttcctcggccatggcgtcgcgcagcgcttcgcgaacggtcatggagaccatttcggtgccggcggggatttccggatcgttcggaacctgggccttgggctcggcgggaaccggagcagcggcggcggcgggcgcttcagcggccttcggcgcctcagtggcggccggtgcggcagcggcagatgcagccgagatgtcggatgcggattcgccgtcctgcaggagaaccgcgatcttggcgttcaccttgacaccttcggtgccggcggcaaccagaagcttgccgatgacgccttcgtcgacggcttcgacttccatcgtcgccttgtcggtttcgatttcggcgatgacgtcgccggaggtgaccttgtcaccttcctgcttcagccacttggacagcgtgccttcttccatcgtcggagagagggcgggcatgagaatatcgattggcatgggtctaccctccccgattacagcagaatgtcggtgtagagctcggatacatccggctccggtgcggcctgggcgaagtcggcgctgtcggcgacgatgtcgcgaacgtccttatcgacagccttgagatcgtcttcgctcgcccagccacgctcgatgaggcgtgccttgacctgctcgatcggatcctgctcggagcgcatcttctgcacttcttccttggagcgatacttggccgggtcggacatggagtgaccgcgatagcgataggtcagcatttcgagaatgatcggacccttgccggaacggcaatgctcgagcgcctcgtctgccgcagccttgacggcgcgaacgtccatgccgtcgacctggacgccggggatgccgaagccggaaccgcgcagcgagtagttcgactgcgccgtggcgcgcgccgtggaggtgcccatggcgtaacggttgttctcgatgatgtagatgatcgggagcttccagagagcagccatgttgaagctctcgtagacctggccctggttggcggcgccgtcgccgaaataggcgatcgagacgctgtcattgccgcgatatttgttggcgaaggcaagaccggtgccgagcgacacctgggcgccgacgatgccgtggccgccgtagaaatgcttctccttggagaacatgtgcatcgagccgcccttgccacgggagtagccgtcgacgcggcccgtcagctcggccatgacgccgcgcgcggtcatgccggttgccagcatgtgaccgtggtcgcggtaagcggtgatgacctggtcgccttccttctgcgccatctgcatgccgacgacgacagcttcctggccgatataaaggtgacagaagccgccgatgaagcccatgccgtaaagctggcccgccttctcttcgaaacggcggatgagcagcatttcgcgataggccttgagctcttcgtcacgatcgaaatcggccaccgggccaccattcgatgccttcgcggctggctttgcgcttgtcttacggctggaaacggtcgcgttttttcgcggagccattcaaccctccctatgggtttatcggttcttgggtggtgcgcaccatagggaagaaatttcgccacagcaatgccataaatgcatggctcatattctgccgtaagctattgatagttatcaatttatttcgattaaccggaattcggttaatttgtataattgttgaaaatgacgacttcgtcggcacgcgagaagttcagctgaagacgcgccttctcgtccagcatgtccctgtccatggaaccatcacttaggagcgccacctgcttttcaaggtgctcgcgcttatttttaagcacggccagctccctctccttggcgatgcgctggcgctcgaacgcctcggtcgcgcgcagaccgtaatcgccatggatggcatgatagccaaagtagcagagaaacgcgaccgtcatcgccgggatgacgaaacggccgatctttttcttcttatgatgcttggtccacatacacgcattctcgaaacgcattaccgttatcgacaagcctagcgggcagagattaaccgtccgttgactatgaacgcggcgcaataaaaaacccgcgccgttatgaactgatccccgaaagttggttatccaatttcggggatcagttcacgagagcgcgggttccaaatgcctgaaatcagcagcttagccgcggatgatcgaacggccggcgtactgcgcctgagggccgaggccttcttcgatgcggatcagctggttgtacttggccagacgatccgagcgcgacagcgagccggtcttgatctgaccgcagttggtggcaacggcgagatcggcgatcgtcgaatcttcggtttcgcccgaacggtgcgacatgacggcggtgtaggctgccttgtgcgcggtgttgacggcgtcgagcgtttccgtcagcgagccgatctggttgaccttgacgaggatggagttggcgacgcccatcttgatgccgtcgcgcaggcgagccgagttggtgacgaagagatcgtcgccgaccagctgaaccttcttgccggccagatccgtgagcgtcttccagccatcccaatcgtcttcagccatgccgtcctcgatcgagatgatcgggtactgggcagcgagctgcgcgaggtactcggccatggcgcccggctccagcgtgcggccttcgccttcgagaacgtacttgccgtccttgaagaattcggtcgcggcgcagtctagaccgagatggatgtcctcgccaggcttgtagccggctttctcgatcgacttcatgatgaagtcgagagcttcaggagcgctcttcaggcccggtgcgaaaccgccttcgtcgccgacgttggtgttgtgaccctgggcagcgagttccttgcgcagcgtgtggaagacttccgagcccatacggacggcttcgcggatggaatcagcaccaaccggcaggatcatgaattcctggaagtcgatcgggttgtcggcatgcgcgccgccgttgatgatgttcatcatcgggaccggcagcaggtgggcggaagcgccaccaacgtaacggtagagcggcaggccggcagcttcagcggccgccttggcgacagcgagcgaaacgccgagaatggcgttggcgccgaggcgcgacttgttcggcgtgccgtccagctcgatcatgatgttgtcgatctggatctggttttcggcatcgatgccgccgatggcgtcgaagatttccgtgttggcggcttcgacggccttttcgacacccttgccgaggtaacgcttgccaccgtcgcgaagctcgacggcttcatgcgcgcctgtcgaggcgcccgacggaacggcggcgcggcccatgctgccatcttcgagatagacatcgacttcgacggtcgggttgccacggctgtcgaggatctcgcgggcgataatgtcggtaatagcggtcatcggctcttctctgctggagggtggataaatcgtttgaaattcgtctaaatcgaagatgcgcaaattacaatggcagttcggggcccttttgcgcatgcttcgccgcattgttcgtggctggcctaatacacgaacgtgtcagtcgtttgaacgtcagcccttggcgatggcgtcgaaggccagcagcttttcaagcaggcgcggcatgtccttgagatagaccatgttcgggccatccgatggggcgttgtcggggtcttcatgcgtctcgacgaacacgccggccacaccgacggcgaccgccgcgcgcgccagcgtctcgacgaattcgcgctggccgccgctcgagccgccctgcccgcctggctgctgcaccgaatgggtcgcatcgaaaacgaccggcgcgcccatcgcttccatgatcggcagcgagcgcatgtcggagaccagcgtgttgtagccgaaggaggcgccgcgctcgcacagcatgatgttcgggttgccgctggcattcagcttggcaagcacgttcttcatgtcccacggcgccaggaactgacccttcttgacgttgatggcgcggccggtcttggcagcggcaaccaggagatccgtctgccggctaaggaaggccgggatctgcaggacatcgaccacggtggccacgtcggcgcactgctcttcgctgtggacgtcggtgaggaccgggaagccgaactccttcttgagatcggcgaagatttcgagccccgcttcaagcccgatgccgcgctgcgccgacagcgacgtgcggtttgccttgtcgaaggacgacttgtagacgaggccgatgccaagcttgtcgcagagttccttcaacgtgccggcgaccatgaaggcatgctcgcggctttcgatctggcacgggccggcgatcagagacaggcgggcgctgttggaaaacacaacacggccggcgccttcgcccacggccacttcggaattggtttcagtcatcgtttctcctcgaaggcgaagagtgcaccctggccgggcgcggccttcaccagaattcgattgttcttgcgtgtgtaggtgatcccgttagcagccaaatgcgcctctgtcacggcgagatcggcaacggcgaaaacaatcgccgagccgcgcaaaccgcgatcggctgtcgactgggacagatcgtaataggcgtccagcccatccggcgacaggatattgatacggacattgcccgcgtcgagactgacaccgaaggcctcctggcgtgacgcggccgcatcggacgccagctgcaacagcggcgcgaacgccttgggatcggacgacgagagcacgatcgacgcgatccccgatacgccgttggcgtgcgtctccaaggccttgcggtcgcttggcagcggattgacccgctggcaggcgaagaggaagaaatcgggcgcgcgcagatcggccgcgaaggccaggcggaacgccgccgtcacctccgacccgtccggcatcctcatcgacctggcgaattgcagcatatcaccgccgctcatgccatcggtcataaatcgcgcgtgatcacgatcggcgtccggcgtgccgaacacgatcgccgacaagccgtcgtcgccgcaccgaaagcgaaaggcgcggtcgcgcgccgcaaacacgttcccgtcggcgatggcggcctcataggcctcgatactggcgatgccgagcggctcgagataggtcttgtcggcgaagaaaacgcaggcgttcgcggttccgaagggatgcagcgcatcggcagcgaccgtgaagccgagcttgcccaaacgctcgcgcgccatctcgatgttgacgacaggcaggacgacgtggtccagaggatggggttcactcataggcaaatcctcccgaaatcggcagagatgtgcgctggctttcgccacaatgcaagaggcgagcgcggttaaatcgaatgaagcgcaaaatcgcgacgattcagagccaagttttacgaaaatttaggcacttgcggaacacatatggaacatatagtgtccgttctggatttgtttcacgactctggggttcaattcgatgctcacgcgcaagcaacaggaactgcttctgttcattcacgagcgaatgaaagagtcgggcgttccgccctccttcgacgagatgaaggatgcactcgatctcgcgtcgaagtccggcatccaccggctgatcacggcgctggaggaacgcggcttcattcgccggctaccaaacagggcgcgcgcgctcgaggtcatcaagctgccggaagcctataatccgagcctgcagccacgccgcggcttttcgccgagcgtcatcgagggcagcctcggcaagccgcagccggtggccgccgcccctgccccgaagccggcgccgagcgccgacaacggaaactcggcttccgttcccgtcatgggccggatcgcagccggcgtgccgatctcggcgatccagaacaacactcacgacatcaccgttcccgccgacatgctcggctcgggtgagcactacgcactcgaggtcaagggcgattcgatgatcgaggccggcattttcgacggcgacaccgtcatcatccgcaacggcaacaccgccaatcccggtgacatcgtcgtggcgctcgtggatgacgaagaggcaacgctgaagcgcttccgccgcaagggcgcctcgatcgcgctcgaggcagccaacccggcttacgaaacccgcatattcggaccggaccgcgtcaaggtccagggcaagctcgtcggcctcatccgccgatatcactaatcggtgacgggtcgcccgcgaagctgtcattgcgccagtcataggcgcgatgacgcatccaggggcgatcgagactgccgtaagcggttttgacgacgggcgagccttgctcgtcgatacggatttcgacggctcccgagcgccgcaaggtttctccggtcaggagcatggcgccggagcggcatgtcacctcgcggagacggacgggtgtgacgacgatatcggcgacgtcgcaggcgggaccgagataagcggcgttttccagcgtcgcgatgatgtagccgctgtcgagcgtggtcacgcaccacgccgtcttcaggcactggaagccattattgttcgtcgaatccgctgcgccgcgcatcatgccgcgggcttcgcgttgttgtctcggtgtcaatctcggccttggctcgccctttttcgggatggacagcgcctcgccatcgagcatgtccggcggcgtttgattttcaatggcaagcgcgcgctgccattgccccagaatgaagtcgggcgggcgttcgcgattgctggccaggctgtcgctcttgagcgatgccacgaggcttccatcctcggacacgacaagctcgggcgccggctcggccggcagcatgacgaggacaagggttgcaaccgcggcacccacggcgccgatccagcgcaggcgcgtcagcatcagcccccagattagaaagccgacgacggcgatcacgaaataccattcgggaatcctgcccgtatcgacgctaccgccccagcccgacaccatcctggcgatagcgatcaccagatccagcccgaagccagcgacgatccaaaagggcgcatcgaggccgaatggcgtcgccaacatggcggccattccaaagggcatgacgatgaaggagatgaccggcatggccaacagattggccggcagcccgtagccgctcagcctgttgaaatgctcgatcgaaaacaatgcggtcgagaagccgccgatcatggaggtgagcgcgatgccgccaaagaagcgaagcgcgaacatgaccggtttcatcgccggatgcgtgaaaaagacgctctcgcgaggtcgtcttctggtccagacggcaaagccggcgaccagcgccagggtcgcggcgtaagacatctggaagctggggccaagcacttccgatggcgacagcaatatgatcagcagcgcggagagagcgatattgcgcagactgatcgacggacggtcgaacagcgccgcgaccagcatgatcgccatcatgatgaaggcgcgctcggcggagacggcgaagccggagatcatgtaataggcggtcagcgccagaagcgcgctgccggcggcgaacttcttggtcggataggcctgggcgaagccgggaaagagaccgaagaacaggcgcagcccgacgaagcagatgccggccgacagcgccatgttgagccccgagatcgcgacgatatgcgcgagaccggattgacgcagcgcctcggtcgtctcgttggagatggcccgtctctcgtcggtgaccagagaggcggcgaaggcgccggtatcaccggacaggatgccacggatgcggtcgccgatgcggctgcgcaggccgtagagccaggccatggcgcgatctttcgcggagagctcgacgctatccaccggcgacgggaggagttgcggcgtgccgtagaaaaaaccgttggcgccgatgccgtcaaaataggcggaaaatgcgaaatcgctcagtcccggcagcgccggccccgccggcggcgtcaggcgcacgcggccggtcagccagccgccgaccgcgacgggttcgccggcgcgggcaacaagcgagatttgttccggtggccgcttgagagccggcgtctccgttcgcgttaccctgagaatatagcgccagcggccgttgtcgtcgccctcacgccgttccacgcggccggtcacggtcgttgtcaccggcgcgtccagaaccacggtggccgcgcgccacgtctcgatctgcgcggcaaacatgccgagcacgacgagcagaccggccagagccatgcggcgggttgccacgcgcccgacgccggaaagcaggaatacgagcacaaaggcggccgcccaggcaagcaatcgcgtcggcggagggtcgctcgaaagcctgaaccatgcgatggcgccggccccgagcagaaccggcgacgccaggaagaaccggccatggtcgaattcggcggcgaacgcctgtctggcgaccaccatctggcgggcgattcggcggtttgcgcgaccaagaaagcctgacgaggactgcgtcaagggcggacgtgtgactatggcacgggcatttcgcccggccgcgtccggcaaattggcaatttgcgccgcttcgggtgctttcaaaaccgcgttactggcattcaactccggcatgcaaaaacacccgaaagccaccctgacctgcagtcagaatgccgctctcggaaccgaaacgcaactataatcgtttgaattcaaatgcgaaataaaaccatcgaaaatgtcaggattatcatcgacttccgctatgcggagacggcatttcagcagtgctcaaaagttgatactgcgatgcacaaaatggcgtcacggtaacttggcattaggcgcgcgatcatatagctatcgcagacgacgcttaaccctatggcgcttttatggcgccacccgccagtttggaggatcataatgacggatcaaagcgcaacactgaaactcggtgacaaaaccgtcgagctctctgtcaagagcggcacgattggccccgatgtcatcgatatcggcgccctttacaagaacacggcttccttcacttacgatcctggtttcacctcgaccgcatcctgtgaatcgaaaatcacctatatcgacggcgacgagggcgttctgctgcaccgcggctacccgatcgagcagctggccgaacagggtgatttcctcgaagtctgctatctgctgctctacggcgaactgccgacggcggcgcagaagaaggacttcgactatcgcgtgacgcaccacaccatggtgcacgagcagatgagccgcttcttcaccggcttccgccgcgacgcacacccgatggccgtcatgtgcggctgcgtcggcgcgctgtcggccttctatcacgattccacggacatcaccgatccgcaccagcgcatggtcgcttccctgcgcatgatcgccaagatgccgacgatcgccgccatggcctacaagtaccatatcggccagcccttcgtttatccgaagaacgacctcgactacgcgtcgaacttcctgcgcatgtgctttgccgttccttgcgaggaatatgtggtcaatccggtgcttgcccgcgccatggatcgcatcttcatcctgcatgccgaccacgaacagaacgcatcgacctcgaccgttcgtctcgccggctcctcgggcgcaaacccgttcgcctgcatcgcggccggcattgcttgcctctggggccctgcccacggcggcgccaacgaagcagcgctcaacatgctgcaggaaatcggcacggtcgaccgcattcccgagtacatcgcccgcgccaaggacaagaacgatccgttccgcctgatgggctttggccaccgcgtctacaagaactacgacccgcgcgccaagatcatgcagaagacgacgcatgaagtgctcggcgagctcggcatcaaggacgatccgctgctcgacgtcgccatggaactcgagcgcatcgcgctgaccgattcctatttcatcgagaagaagctctatccgaacatcgacttctattcgggtatcacgctgaaggctctcggcttccccacgaccatgttcaccgttctgttcgcgctcgcgcgcaccgtcggctggatcgcacagtggaacgaaatgatcgaagatccgcagcagcgtatcggccgtccgcgccagctctacatcggcgaagcgcagcgcgactacgttccggtttccaagcgctaatatcagcgcatcgaagcttaaaaagaaacccggtcagaactgaccgggttttttgtttccaagcacatccagcacaatctcggcggcatggacgccaggtggcttttcggtctgcatccgctcccagacgagatcgtagccctccatcatcgagcggcgcggcagggtgtcggaagagagtttctcggcccagcgcgtgaaactcgcgccgcgcacgacctcgttgatatattcgggcacgaccgcgtaatccgcgattaggttcgggatcgccgccgtccagatcttgatcttgccggtcatcagcttgatgatccaatccgtcttgtaggccgaaacggtggggacgccggcgagcgccagttccaggatcaccgtgccggatgccgccatcgcggcgtccgcctcggcgaaggcccgccacttgtcgtccttgccggtgaccacgtcgggttttaccggccagtccttcatgatctcgcgaaccatggcctcgcggcgcggcgccgtcggcagcacgaagcggatgccctggttgcgggcggagagctcggccacagcgtcaccgaaatagggcaagagccttgagatctccgagccgcgcgagcccggaaggagcatgatcgtcttcggttcatccgcggggcgcggcttgcttgccgccctcgccttgcgggtcgcgagcacatcgacgtcggctgtcaggcgatggccgacataagtggtcggcgggccgccgagcttgcgcatcacctcgggctcgaaaggcagcacggcgagcacatggtcgatatagggcagcatgcgctgcgcgcgatattccttccacgcccagacactcggacagacgtagttcaccacgggcagatcgggcagcgccgtgcgcacgcgcttggcgacgcggtgggtgaaatcggggctatcgacgatgacgagcacgtccggcttggccgcgatcacggcggccgcggtctggcggatgcgcttgaccagcgtcgggagcttggcgagcacctgggtgatgcccatgatcgacagctcggagaaatcgaacagagacatcagtccctgggcctgcagcgcctcgccgccaacgccgacgagttccaccggacccgcatattgctgcttcagcgcggcgatgagatcggccgccagaagatcaccggagacttcgcccgcgatgatcgcgaccttcaatgcacgcacgctcattcaagcccccaggatggcaatccacgatccagaccgcagacgaagataccggcttcctttgccgccgatatgactgccgggcgatccaggatcagcgcgcgcccggcctcgatcgcaacacccgccaggccggccttgctggcattctcgatggtcgagatgccgatcgacggcagatcggcgcgcagatcctgctgcggcttgcagagcttgacgaggacaccacggcgccgcttcgagatacggccggcggcgcgcagatcggcaacacgctgcaacatgccatcggttccctcgacgccctcgagcgccacgatgcgcccgccgacggaaacggcgccctgccccacatccagccggccgagcgcgtcggccgcggcacccgccctggcgatgtccttgacgtcctcggccgacggcttgatggcatcgagcggaccgacggcggcgagaagatccggtgcgatctcctgcacgccgatgacgcggcggccgttcttctcgatcagcccgatcaccatgcgcaacacggtatcgtcaccgcccgaaagcagcgtgcgaatggtcgagggaatgcttgcaagcgtcttcagcgtcgggcgaacctctcgccactccggccgtctgcgcacggcgccggacatgacgacgcggtcgatgcgattgctgtcgagcatacggtcgatggccgcgaagtcgccgacgccgacaatggcgtgctcgaacccttcccacgagcggtcggtttcgttcttcagcgcaatgatcagcgggtcttcgcccgcgctcttggcggcctcggcgacataggacggcagaaagccgctgccggcgatgatcgccaggcggcctcttgccgtgtcacttgctggagacaaggtttatcccttctgtccccgggtcggagaagagagcgcgcggtcgctttcggcggcgatgaaatcgaggatctggacgacctgttcgcaatcggcgaattccgcgcggatggcggcggcattgtcacgcagattgccttcggtttcgaagatcgccttgtaggcacggcgcacgatatggatcgtggcgcgatcgacgccggcgcgcgtcatgccgacgacattgaggccgcccaggagacccggatttccattcagcatgccgtatgggatgacgtcatagctcaccgccgagagaccaccgacgaaagcgtggcggccgacgcgggtgaactggtgcacggcggaaccgccgccaagaatgacgcggtcctcgattgtcacatggcccgcgagcatcacgttgttggacatgatgacgtggtcgccgacgcggcaatcatgcgcgatatgcgagttggcgagaaacagattgttgctgccgacgatggtcttgccgccgaaatcggcggtcccggtgttgatcgtgacaccttcgcgcatcgtgcagttatcaccgaccgtcagcgtcgtgtcttcaccaccgtgatgaacgctctgcggatcgccgccgatgacggccatcgggaagatccggcaccccttgccgagcgtggtgatgccggtcacgatcgaatgcgggagcatttcggtgttgtcaccgagcacgacgcgcgggccgacgtggcagaatgggccgatcttgacgttctcgccgatcacggcgccgtcttcgacgacagccatcgggtgaatggtggcgctggctgcgatcttgctcatgcctgatccttgcgcacgatcatcgcaccgatatcggcttcggcgaccagcgctccatcgaccttcgcatcacagtggaacttccagatgttgccgcgctgcttctgcttgacgacatgatactccacccggtcgccgggaaccaccggcttgcgaaaacgggcgttgtcgatggtcatgaagtagaccaggttgccgctctcgccctgcttcttggcgcagatcgcgcccgccgtctgcgccatgccctcgaccagcaagacgccgggcatgatcggctgctccgggaagtgtccggtgaaatgcggctcgttggccgtcacgttcttgatgccgatggcgcgatcatcaccgtcgatctcgatgatcttgtcgaccagcaggaacggatagcgatgcggcagcaacttcatgatttcgatgatgtctgccgaagaaagcgactttttgacttcttcagtcattcttttctcccgttttcttggcgcccgaagatcgagccagcacgcttgcgacttcccgcaggaaatcgttggccggccgcgctggtatccctgcatagcgttcccgcgcagggatgtcggcgatgacgccgctcatggcggctatctgggcaccgtcgtgaatggttatatggccgcgaatgccgctgtgaccaccgatctgcacgccgtcgccgatcacggcgctcccggcgatgccgacctgcgagacgacggcgcaatgacggccgatgcgcacattgtgaccaatctgcacgaggttgtcgatcttcgttccctcgccgatgaccgtatcgtccatggtgccgcggtcgatcgtcgtattggcgccgatctcgacgctgtcctgcaggatcacgcggccgatctgaacgatcttgatcatgccgcgcggacccggcgcgtagccgaatccgtcctggccgatgctggcgccattgtggatgatgacgttattgccgaccagcgcgcagagaaccttggcgccgccggcgatggtgcagttacggccgatcttgacatcaggtccgatgatggcgccggccccgatccgggttccctcgccgatctccgccctggcgccgatcacggcgaacggttcgacttcaacattcgcctcgagtttcgccgtcggatcgaccgcggcgcgatcggagaccaatgcgttctcggacatcatcttctgcggacgcagcgctgtcgggtagagcagcccgccggccatggcgaatgcggcatgggcgtttttcgaaacgagaacaggcacatgcgccggtatgatcgactgcaacgcggcgctgcacaagatggcggacgcctcgcatgtcacgagttcgtccttgcttctcttggaaatgacataacagagatcccccgccttcgcccggttgacgggcgaaacggagcggatcacgatgtcggcatgcttggggtcggcaagttccgccccaagaaattgcgcgagctcagagagcttcatgccgacatggggcggaaagaaataggtttgctccatcggcaaatctccagaacggaattcgattttacggttccggactgccgatatcagaattggttgttgatgccaaacttgaagttctgaaccttgtcgtagtcttccttgaggaccgggatcgcgtaatcgacgcgcagggcgccgaacggcgagttccagacgatgccgacaccgacggaggcgcgcaacgacgcatcttcgccgttcacgaactcggaaccgctgacattgaccttgttgccgaagagcgtaccggcatccgcgaataccgcaccacgcagaccgaagtcgcgcgggaaagccggaagcgggaacgttgcttcggccgaaacggtgaagtaggtcgtgccgccgagcggatcatccggaccaccgccaacgcgtgggccgatacccttgttctcgaagccgcggatgtcgccgttcgtcagcgtgaactggtcgaagacgttcagatccttgccgaatcctacgacgtagccagccgaaccggcgaccgagccgatgatgtcggcgtcgtcggcgagcaggcggtagtagcgcgccttgccgtacagcttatagaattgcgagtcaccgccaagaccggcgatttcctgcgttacgctggcgtagataccttcacgcggcaggatcatgtcgtcgagcgtgttgtaggtcagcgtctgcgacacagacgacttcacccacgggctgttgttgacgagatcctgatacggcgtcgacagatcagacagcgagttcgacggatcgtacttcatctgcttgtagttatagcggaacgtcgtcgccagatcctcggtgatcggcgccgtcgcacgcagaacgacgttgttttcttcgtaatcgtagttgtcgttgctcgacgtctggctgtggttgatgtcgaagccgacagcgagacggtagccgaggaagtaaggctcggtgaagttcaggccgtagctgcgcgaaccttcttcaccaccaccggccgaaaccttgatgtactggccacgaccgaggaagttcttttcctcgatcgaggcttcgagcagcaggccgtcgccaccggcagcgtaacccgcgccgataccgaacgagccggttgcctggtcctgaacgtcgacgacaacgacgacgcggtccggcgagctgccgggctgggtcgagatgttgacggtcgagaagtagcccagagcctcgagacgacgcttggccttggtgatcatctgctgattgaaggcgtcgccttcgctcatgtcgaactcgcgacggatgacgtagtcgcgcgtgcggctgttgccgcggatttcgatacgctcgacgtaggccttctcgccctggtcgacgaggtactcgacaccgatcgtgttgttgttcaggtcgcggttgccgcgcggcgtgacgcgggcgaacggatagccggccgaagccacctgatccgaaatcgcttccatcgactgctgaacttccttggcgttgtaaacctggccttcgcgggtgcgaacgagaccctgaagctgggcgccatcgataccctgaaccgtcgactgaacggacacggcgccgaagtcgtagcgcgggccttcctcgatgttgaaggtcagcgtgtatttgttggtcgcctcgtcgaaggccgcgtccgaagacacgatgcggaagtcggcgtagccacgattgtagtagaactggcgaagcgcttcttcgtcggccttcagcttgtccgcgttgtagacgtccttgcgggtcaggaacgacaggaagttgctgcgcttggtggcgatgaccgatgcgagacggccggagctgtaggcgttgttgccgacgaagttgatcgaatcgatcttcgtgcggtcgccttcattgacgacgaatgcgaggttgacgcggccctggccgagcggcacgacctgcgtcgtcacgtcgacttcgctgcggccggtcgccgcgtaggcgtccttgatggcctggatgtcggcctggatctgggtctcgttataggcaccagaagactgcgtcttgacgaccgccgcgagcttgtcgtccttgatcttgcggttgccgttgaacacgacctggttgatcagctgagcttcctcaacggtcacaaccagcgtgccgccggaaaccgagatcttgacgtcggagaaatagccggtgtcgtagagctgctttacggagtcgtcgatgtcggtattggagaagctcttgccgggctggatcgtgaggttggaccgcaccgcctcggcgccgacgcggttggcaccgcgaacgtcgacacgttgaatgactgcggcctcggcagcagaagccgagatgaacactgttgcactcgcccccgacgcaacaatacctgcagacagcgcaaccgccgatactgcgttcaaaaatcttgaaccagccttcatttcacccattaccttttttctcgtccccatcaccaggcgtcccccgattccggtcacgtgtgtcgttttacccgcttttgatatacaagcaagggagctagttaatttctgtttacttcatttcaaaccgtgacgctttcgccactacagctttgaaacatcgtaaataaattgtaattttccctcatcccgcaatcagccgatcagagcactaatatcgttccatgtggcgaaaaccatcaggctcagaaccatggccagtccgacgcgaaacgcaatctcctgggccgacgatcccaacggctttcccctcacagcttcaatcgcatagaacatcagatggccgccatcaagtaccggaaccggcatcaggttgagtaatcctatcgaaaccgacaagacagccgccagctgaagcaaagctgcaacgcccagcgtcgccatctgacccgaggcctgcgccacgcggatcgggccgccgagctggtcgggcttcatgtaaccggagaccagattgccgatatatttgaaggttccggtgacgatatgccatgtctgcagcgtgccttcctgcagcgcttcaaccggcgtgtaggtctgctggcggaagtttccgacttcctggttggtcacgatgccgatcagaccgatctcgattttgttaccgaactggtcggtcatgtcggtgcgcgcaggcaccatcggaacgtcgatcttctcgccgtcgcgctcgatcgtcacgacgattctctgcatcgggcggatgctaacgtagcggcgcacgtcgtcgaaggtctgcaccttcgcgccgtcgatcgcgatcagcagatcacccggcacgacgccagcctcggcggcaacgctgcccggcttgacttccgccacgacgggatcggcgaccgagcggccgtagatcgaaaacagcactgtgaagatcgcgatcgccaggatgaagttggcgatcgggccggcggccacggttgccgcgcgcttccagagcttggcgccggcaaaggactgcgcccgctccgcgtccgacatttgcgcgagttgcccctcgtccggcttgctcgacgcgtcctcgtcgccgaagaacctgacatagccaccgagcgggatcagcgagagcttccagcgcgttccatgcttgtctgtgtagccgatgagttcagggccaaaaccgaccgaaaacgccaggatacggatgccactccagcgaccgacgaggtagtgccccatctcgtgaatgaacaccagaagagaaagcacgagcacgaaaggaacgatatatcccgtcagaaacccaaaaattccggtcaagccttccatatgatccttccgtcggcctgtatcgaccttatgcgccgaacagggccgcgcccagcgacgccatttgttcgccctttatcagcgaaaaaagcccggctagcaagaacgccgcaaagcaggcgaaaatgagcccgtcaaccctgtccatgaccccgccgtgccctggaatgagacggcttgaatccttgacgccgaagcggcgcttgatgaaggattcaaagagatcgccggactggctgaagacggagagcaccagcgcgacgaagccggcgagcggaaccgcattgggaaattccacataggccaccagcataccggcggcgaccgcgcaaacagcgcccccgatcgcgcccgaccaggtctttccaggcgagatttttggcgccagcttcggcccaccgatggcgcgaccgacaaaatacgccaaaacgtcggtcgcccagacgacggcgaacacgaacagcatcgcgtgcagaccggcaggatcggcgccacgaatgttcgccagcgcgatcccggtcagcccggcgtagacggtccccaccgggaaccagcgcgatacgccacgcatgacgacgaagccgaccgcgatggccaaaaacaacaacagaaggatcagcgagtagccgacggtgcccgagacgaccgcgacggcgatcgccgcctgcccgatccagccgaccgcgttggcgaccggctcgttggcggcaagcctggttatcttcgaccactcacgatagatcagaagtccgatgaccgccgacagcacactgaaggcgagaccgccgtaccaggtcgcgaccagcacgatgagcgcgagaacgatgcccgaaacgacacgaagctgcagttcgcgttgcatcaggttcccaccgccgccgcggcttcggcgacaagaccgccaaagcggcgattgcgggaggcgaaggtctccagcgccgcgtggaacgtctcgcggctgaaatccggccagtagtccggaatgaagatgaattctgaataggcggcctgccagagcaggaagttcgacaggcgctcctcgccgctggtgcgaatgatgagatcgggatcggggatgcctgatgtatccagccgggcggtgatgagcgccggcgtgatatcctgcgagcgcaggcgaccttgctcgacgtcatgcgcgaggctcgccatggcgcgggcgatctcatcgcgcgagccgtagttgaaggcgatgatcagcgtcagggccgtgttggccttggtggtctcttcggcgtcgatcagcagatcgagaatgtcgttctgcaggctgtggcgatcgccgatgatcttcacgcgcacgttctggcggtgcagttcggcgaggtcgcggcgaatgaacgccttgagcaggcccagaaggtcggatacctcggtttccggacggcgccagttctccgacgaaaaggcaaagagggtcagatacttgacgccaatgtcgcccgccgcgcgcacggtctcgcgcacggcgtcgacgcccttgcggtgccccatggtgcgcggcaacccccgctgctttgcccatcgaccgttgccatccatgatgatggcaacgtgttctggcacagtcacgaatgttctttccaacatttcccgtccggtttctacagtccaaggcgcaggcgctttgcgccttagacctgcatgatttccttttccttctcgccaagcaagcggtcgatctcagaaatcgtgtcgtctgtcatcttctgcacacgatccgactgcgagcggctcaggtcctggcctatgacaccgtccttttcggctttcttaaggccgtccatgccgtcgcggcgaacatggcgaatcgcaaccttgctcttttcggcatagtcgtgcgctaccttgacgagcgacttacggcgctcctcgttgagttcgggcagcggaatacgcaggttctggccgtctacgatcgggttcaggccgagattggcttcgcggatcgcgcgatcgacggcaccgaccatcgacttgtcccagaccgaaatgccgagcatgcgcggctccggcacggtcacgttggcgacctggttcagcggcacgcgcgaaccataggcttcgaccgtcaccgggtcgaggatgttcgccgatgcgcggccggtgcgcagcgatgcgatatcgctcttgaacgcattgatcgcgccatccatgcggcgcttgatatcgttgatgtcgatgccttcactcatagcagtgctcccgtctcggtagaagctgcggcgctcgttgggcgccgccactctgtcagttgtcggtgacgatggtcttcagaccaccgcccctgaggatttcagcaaaaccgcccttctcgtggatcgagaagacgatgatcggaatggagttttcgcgtgccagggcgaccgccgcaacgtccatgacggcaaggcccttgtcgagcacttccttgtgggtcagctggtcgaagcgcgttgcgtcgggtatcttcttcgggtcggcggagtagataccgtcgacctgcgtgcccttgaagatcgcctcggcgcccatttcggcggcgcgcagcgccgcggccgagtcggtcgtgaagaatgggttgccggtgccgccggcgaagatcaccacgcggccgagcgacagatgatagagggtggcgcgctgcgagaagctctcgcagatctccggcatggcaatcgccgacagcacgaccgtatcgatgttgagcttgcgcagcgaggtcgccagcgccagcgcgttgatgacggtcgcgagcatacccatgtggtcgccggtaacccggtcaccgcccttggaggcgacggccacgccgcggaagatgttgccgccgccgacgacgacgccgacttcaacacccatctgccgcgcttcggcgatatcggccgcaatgcggtcggccaccgctacatcgattccaaatccctggctgcccatgagggcttcgccggaagccttgagtagaacacgtttgtagacaggctctgacgacatcttggctcctcgtatattaccgctgagtgccggatacacgaagggcatcgcgttgtcacgcgatgcccttctgttttcacatatataggacgatcagcccttggcgacagcagccacttcagcggcgaaatcgctctcttccttctcgacgccttcgccgaggagaagacgggccatgccgacgacttcgatcttggcgccggcttccttggcagcggcttcgacagcagcgccgaccgtcaggtcggggttgatgacgaatgcctgcgagagaagagcgacttcctcgaagaacttgcgcatgcggccgtcgaccatcttttcgatgatggcttccggcttgccggattcgcgagcctgctcgatgaagacgttgcgttcgcgctcggcgacagcaggatcgacttcctcggcgcggatcgccagcgggttggtcgcggcgatgtgcatggcgacctggcggccgatcgaggtcaggacggccttgtcgccttccgacttcagggcaaccagaacgccgagcttgccgatgccgtcgccggcagcgttgtggatgtaggtcgcgacaacgccgtgctcgacttcgagcttggcggcgcggcgcagcgtcatgttttcgccgatcgtggcgatcgcgtccttgatggtgtcggcgaccggcttgccggatgccgggtaggtcgcagccgagatggcttcaaccgaaccatcggtcgtcagagcaacgctggcgataccgcgaaccagatcctggaaggcgtcgttacgggcaacgaagtcggtttccgagttgagctcgacaacgacagccttgtggccggcgccagcgatggcgatcaggccttcagcagcagcgcgaccagccttcttgtcggccttcgagatgccctttgcgcggagccagtcgatcgatgcttcgatgtcgccgttgttttccagcagcgccttcttgcagtccatcatgcctgcgccggacttctcgcgcagttccttcaccagtgcagccgtaatctcggtcataagcttcctcttgtcggttcaaacggtggcccgctagagcggtgcggcaccggattgaggcacgaaatgtacctgtatgtatgacagcgtgatgaatgacgcgtcataacgaaactcaaacggcgagagactgaattccctcgcctgaaatggtcaaggccgcccaacttcatcaaagtcgcgagcggccttttcccaatctctggaaagcatggcggacctgtcgatccgcctgcttcttttatcaggcttcggcttcgccttcgagcgccggctcagccggagcttcgatcgatgcaccgaggtcacggcccgacgagctctgctggcgagcgataccgtcgatggcagcgcgcgagatcaggtcgcagtagagggcgatggcgcgcgaagcgtcgtcgttgccggggatcggatagtcgatcaggtccgggtcgcagttcgagtcgatgatggcgacaaccgggatgccgaggcgcttggcttcgtcgatcgcgatcttttccttgttggtgtcgatgatgaacatcaggtccggcgtgccgcccatgtccttgataccaccgagagccttgtcgagcttttcgcgctcgcgctcgaggttcaggcgctctttcttgttgtagccggactgttccgaagacaggatctcgtcgagcttgcgcagacgctggatcgagttcgaaatcgtcttccagttggtcatcatgccgccgagccaacgcgagttgacgtagtactgagcggaacgcttggccgagtcagcgatgagctcggaagcctggcgcttggtgccgacgaacagaacgcggccgccacgggctacggtgtcggaaacagcctgcagagcgcgcgacagaagcggaaccgtctgtgcgaggtcgatgatgtggatgttgttgcgatcgccgaaaatgtacggcttcatcttcgggttccagcggtgagtctggtggccgaagtggacgcctgcttcaagcagctggcgcatagaaaaatcgggcaatgccatgccttgttatccttttccggttgaacctccgcaaggcgaacagcaccctcttcgaggatgccaccgggcggaaccgtccggatttctcccggacaaatcccatgccttacgtgtggaatgcgggggccataccctccccgccctggaaaatcaagtctcgtcggtaaaataaccgatgagcgccgtcatataggcacgcgcgggaccattcacggccctcgcgcgggtcaatcggcttcgcagggccagctcgtcggcgtcgccatgccagacggcagcttggtgttcgaatcgccgcaggccagcgcaacctgcgccgcatcgagaccggtggcctgggacagatccagtccgctgatcctcgtcaggaacatgaaggcgcgatcgaaggagatcggtcccgtgaaggtggcgccggtgagatcggcccgcgagaggttggtcagcgcgaagttgacgcccgtcacgtccgcgcccttgaaggtcacgcggccaagttcggccttttcgaaattgacgcccttcagcacggcgcgattgaaattggcgcgctgcaactccgctcccgtgaagttggcgccctcggcgttgacgccctcgaagccggagcgataggcctcgactttggagaaattggccttggtgaggtcggagccggtgaaccaggtccgaaccagggtcgccttttccaggttggcggaggcgagattggagtcgctgagattggtaagcgtgaaatcggtgtcggcgagatttcccttctggaaatcgccgccctccaacatcaggttcttcttgttgcaaccaccccagtcgatgccggccgaggctgtcgagccgcagtcggccgcggagatcgaacctgcgaatgtcgccaccatcaacgcggcggccaaggccgtcacggccacgatcgataccctaaagcctggcaaaatacgcactccgttcgccatccacgctcactgtcgagcgatctctagcacagagcgcgcggctttgcatacgctatcacgccgatgcggcgaaatcgttcaacgcgtgcaattacttacaggcaaggttttcgcatcgagaagctctagcttggagagctttccggtcaggacgaaatcgccataatccatggtcagatcgcgggtgatgccgttctcgtagagtttgaacgacatgcgatagaccgggagagcgtcggttttggtgttctcgttgaaataagagatcgtgaccggccagaaggtggccttcgagaaggcgccggcattgctggaatcggcctcgtcgttgacaggcgtcactggcttgccaacgaccgtcgtcgtcgccagcgccttgtcgccatcatcggaaccatcgaacacgcgcgcctcgaacagacgattgccggccttggcgttcttgatgacatccatcatgtgttcggtggggaaacggctggcttccagctgcaggttcttgctcgccggctgcttgagatcgaccttggtagcctcgccctgatcctcggccgcgccggtgacctccttgtcgagctggttgtcggtgaaggactttgtgtcgaaggtgaacttcccgtccttcagattctcgaaggtattggtctgctggtcgctgacgcgcacggcatcgccggtgtcgatctgcgtcacgaagcggaatttcgtcgtatagccggtgcaataatcaccgttgaattcgtagaccatgcggccggacatacccgatatgccagagcgttccgacgcatccttgagttccagatcgtagatggcccggtgcgcgatcaggcccgtggccatccctgcgccgacagaaggtgccgccgcgtgagcggttgccgaaacgcctgcaaggaagagcgcggcaagactcgatcggaccattgataatctcctgttggactcaccaacgatgttataagaacacatccggctaaatcgaggctcgatcgtgtcacaaaattgattcaagcccagatgcataattttagaactaatcacaacaaaagcggagaggaaaatgtccgatcagatcgccgcacggctcaaagagatggggatatccctgccccaggccgccgcacccgccgcaaactacgttccctacgtcatctcgggcaacgtcctgcacatttccggccagttgccgctcgaagacggcaagctcgcatttaccggccatctcggccgcaatgtcgacgtcccccagggtcagcgcgccgctgaactgtgcgccatcaacatcctggcgcaggcaagtgctgcactcggcggcgatcttggccgcatcaagcgcgtgatcaagctgaacggcttcgtggcatcggtcccagaattcgtcgagcagcacctcgtgatcaacggtgcgtcgaacctcatcgccaatgttctcggcgatgccggcaagcacgcgcgggccgccgtcggcatggcggcgctgccgatgaacgccgccgtcgaaatcgatgccatcatggaaatcgcataatgacctccgcagcatggctcaaggaacgtccggtcgcgcaccgcggctatcacgaccagaacaagctcgtctgggaaaacacgctttcggctttcgcccgcgcggtcgaggcaggcttcgcgatcgagtgcgatctgcactacgcatctgacggcgttcccgtcgtctttcacgatgagaatctcgagcgcctgtgcaatctgaagggcgacgtgcgcgaacgcacatcgcaggaacttggattgctttccgtcggcggaacggccgacaagatcccgacgctgaggcaacttctcgaacttgtgaagggaagagtgccgctcgtgatcgagctcaagggccgcgagacagacgacgaaggcttcgtcgaagcggtgctggaggagctcgagggctatgagggccaggtggcgctgatgagcttcgatcattggctcttgaaggaactgaaggcgctgaacgcgccctacccgatcgggctgacggccggcggaaacaagcccgaggagtttgaagcccatgaaaaggctatgaaactcggtctcgacttcatttcctatttttacgcggacctgcccaacccgttcatcaaggcggagcgtgaaaaggggaccgtcgtcattacctggacggttcgcgacgagaaggcgcgcaagcacagcttcgagcacgccgaccagatgaccttcgagggcttcgacccgcgcgcgtcggtttgacgctcgctttttcaacaagatcgtgcgcagactgacaatgcccccaaatcattgaaacggtctcgcattcgctccatgactgatgaactttcaatccgcatagagcggtctttcaccgcgatttccccggagagctggtccaagctcgccggggcctcccgatcaggcacatcgatcgcctacaaccctttcgtctcgcatgccttcctgtcgtcgctcgaggaatcgggatcggcaactgcggagaccggctggctcggccatcacatgctgctcgagacggaggacgggcgcctcgtcggcgccctgcccggctatctcaagaaccacagccggggcgaatatgtcttcgaccatggctgggccgacgccttcgagcgcgccggcggccgctattatccgaagctgcaatgctcgatcccgtttaccccggccaccggtccgcgccttctggtcgccgaggattatccgcgcctcgccgtgcaggatgcggtggcggaaagcctcaaagaggtcgtgcgccgcctcggcgtctcctccgcgcacatcaccttcgttcccgacgacgagatggcgatcctggagagcgaggactatctgcaccgcaccgaccagcagttccacttcatcaacgagggttatgccaaccacgatgaattcctggagacgctcgcctcgcgcaaacgcaaggcgctgcgcaaggaacgccgcgccgcgctcgaaaacggtatcagcatcgactggctgaccggcagcgacctgaccgaggatatctgggaccagttcttcgccttctacatggataccggcagccgcaaatggggacgcccctatctgacgcgggagttctattcgctgatcggcgagcgcatgcccgaggatatcctgctggtcatggccaggcacaatggccgctacatcgccggcgccatcaacttcatcggttcggaagccctttacggccggcactggggctgcatcgaggatcatcccttcctgcatttcgaggtctgctatcaccaggcgatcgacttcgcgctcgcaaaggggctgaaacgggtggaagcaggagcgcagggagagcacaagctggcacgcggttacctgccggtgacaacgcactcggcccactacgtcgcccatgccggcctgcggagggcgatcggcgattatctcgcccgcgagcgcgacgacgtcgagcacatgaacgagattttgagcgagcacagcccgttccgtcgcggcgagcggcttcaggaggattgacgccctcggctttgccgggctacgccaagacgagaccatcaggagagacaagatgacgagcgcggcctacgacaccaacaacatcttcgccaagatcctgcgtggcgagatcccctcggtcaagatctacgaggacgaacacacgctggccttcatggatgtgatgccgcaggcgcctggccatgtgcttgtcgtgcccaaggccgcctcgcgcaatctcctcgacgccgatcccgccgtgctcgccaagaccattcccgtcgtccagacgatcgccaatgcggtgaaggaagccttcgacgccgacggcgtgttcgtctgccagttcaacgaaccggccgccggccagaccgtcttccacctgcacttccacgtcatcccgcgccacgaaggcatcgcgctgaagccgcattccggccagatggaagatggcgccgtgctggctgcgaatgcggagaagatcaaagcggcgctttgatcgatgatgaagcggttcgcgcctcagccgaaccgctttccgcctgacgcaaggcgacggccgcaaggccataggcaatcgcgaagaccaccagtccgccaatgacgtccaccagattgtgcccgccctgaatgacgatggccggcatcatcactgcgttcaggacgagaaagatcgggccgacccaacggatgcggatcatgaacgccgctgacatcgcggccatgaccgtgtggaacgagggaaagccgatgacgccgagcacgttcttcggcgaaatataggtcgcaccgctccggccaagctccaccagttcggcgccgtaatccggtccaaccgccaagggcaccgcatcgagcacgctctgagggagggtgtatatcgacgatgcgccgaatgacgggaagaagaaccaccagaggatggacagcagagccccgatgacaccggtcagaagaaaatgctgcagaagccgcagcctgccggaaaatccaagaacgaaaatgacgaccagtagctgcggcagcgacgtcgcatagaccgcctgaagcgccatcccgatgcgtggatactgcgacgcccattcgacgaaacgcggccagtcgaagccgaagaacgcatcgaaacgcgccagcgcgagatcgacgggctcacgtgcaatcggaaacagcagatagttgaagatcgatccgacgatggtgaagaggatgaagagaccggcggccgtggccgttgcggcaatggactggttgcgcctgacgtggcgatagaattgtccgagtgccatcgcgccgaggccgcagccaaccatgccggcatagccgacgacatcgatcccgacgtccttcgcccacagcaggatgccgtcaagcaccgcaagtgccgcgatgacagtgacgatgatgcgctcggcgggcagaaacaccatggatcaggctccttgctgtcacccgatatagccgatcgcttttaacattcgcctaagtcgatgccgcgccccgcaggcaacggacatgaaaaaggcggcctgggagccgccttttctattcgccttacttcttcggcaccctcggtaccgcgccgcttttcttcggcgcgctctttacctccggctcggcaaccgccgccttcgacttcttgaccgtggccttcttggccttggccttcgtcttcagctcgccgtcatcctcgtcgtccgcctcggggtgcacgacttcggcttccggcttcggcttgatcggcgcggtgtccgatacggcttccagaatgatgcccggcttgccgtcttccttcgggccaacggtgacgttgacgacgccgcccttcttcagcttgccaaagaggatctcgttggccagcggcttcttgatgacgtcctggatgacgcgcgccagaggacgggcgcccatcttttcgtcgtagcccttctcggccagccacgaaatcgcatcctcgtgaaggtcgaaagtgacgttgcgttcggacagctgggcttcgagctgcatgatgaacttctgcacgaccttgtggatgaccacggtcggcagcggcgcgaacgggatgaccgcgtccagacggttgcggaattccggcgtgaagatgcggttcagcgcttcctcgtcctcgcccgtccgcttggacgaaccgaagccgaaggcggccttcgccatttccgacgcgcccgcattggtcgtcatgatcaggatgacgttgcggaagtcgatcttcttgccgttatggtcggtcagcgtgccatggtccatcacctgcaacaggatgttgtagatgtcgggatgggccttctcgatttcgtcgagcagaaccacgcaatgcggatgctggtcgacgccatcggtgagcaaaccgccctggtcgaagccgacatagccgggaggtgcaccgagcagacgcgaaaccgtgtgccgctccatgtactcggacatgtcgaagcgcagaagctcgacacccaacgacgaggccagctgctttgccacttccgtcttgccgacacccgtcgggccggagaacacgtaggagccgatcggcttgttcggttcacgcaggccggcgcgcgccagcttgatcgaggtcgagagcgcttcgatcgcgagatcctggccatagacgaccgaacgcagttcctgctccagattggcgagaacggcttcgtcgtccttcgacacgctcttcggcgggatgcgggccatcgtggcgatggtcgcctcgatttccttctcggtgatcagcttgcggcgcttggacggcggcagcagcatctgcgccgcaccggtttcgtcgatcacgtcgatcgccttgtccggcagcttgcggtcggagatgtagcgcgccgacagctcgaccgccgtcttgatggcgtcgttcgagtaacgcaggtggtgatattcctcgaagtaaggcttcagccccttcatgatcgcgatggcgtcgtcgatggacggttcggccacatcgatcttctggaagcggcgcaccagagcgcggtccttctcgaagaactggcgatattccttgtaggtggtcgagccgatgcagcggatcgcgccagaagacagagccggcttcaggaggttcgatgcatccatagcgccgccagaggtggcgccggcgccgatgaccgtgtggatctcgtcgatgaacagaacggcgcccggatactcctcaagttccttgacgacctgcttcaggcgttcctcgaaatcaccgcgataacgcgtgccggcgagcagcgtgcccatgtcgagcgagaagatcgtcgcgtcggccagtgcttcgggaaccttgccttccatgatccgcttggcgaggccctcggcgatcgccgtcttgccgacgccgggatcaccgacatagagcggattgttcttcgaacggcggcacaggatctggatggtgcggttgacctcggcgtgacgaccgatcagcggatcgatcttgccggtcttggccttctcgttgaggttgacgcagtaagccttcagggcgtcctgctgcttcttggcgccgccttcttcctcggcgccgcgcgccgcattcggcttgctctcggcttcgccttcctcggcgccacgcggcgtgcggttctccgaggagccggcgcgcttgccgatgccgtgcgagatgtagttgaccgcgtcgtagcgggtcatttcctgctcctgcaggaagtacgcggcatggctttcgcgctcggcgaagatcgcgacgagcacgttcgcgccggtcacttcctcgcgaccggacgactgcacgtggatcacggcacgctgaatgacacgctggaagccggaggtcggcttgctatcttcatcgtatccggtgatcaggttggagagttcattgtcgacgtattcgacgagcgtcttcttcagcgcgacgaggtcgacgttgcaggcacccatgacggctgccgcatcggcgtcgtcgatcagggcgagcagcagatgctcgagcgtcgcatattcgtgatgccgctcgttggcaaaggtcagtgcctgatggagcgccttctcaagactaggcgaaaatgttggcacgttcagatcctcacttcttttccatgacgcattgcagcggatgctggtgctgtcgggcgaagtccatcacctggctcaccttggtttccgctacctcgtatgtaaatgttccgcattcgccgacgccgtggttgtggacatgcagcatgatgcgggtggcactttcacgatccttctgaaaaaaccgctccaggatgtggatgacgaattccatgggcgtgtagtcgtcgttcagaataagcacgcggtacaggttgggcttcttggtcttcggtttggtgcgcgttatgaccgaggtgccgcgatttccgttgtccccgttcctttcgctgtcatcttgcatccggatcggctttgcgatcattttcattcgttcctcgatcaacccggcggagcatgggagaggtgctttacccgccgaatgtctgactactaacttagttcataatagagcgattttaagccccttgcttcacactgcaatcacaattcgcccgcgccaagcgcaaagacacaaaaatagcgcgcggatttgagactgcccgacggcaaaacgaaaagaccggctgcagatgcgtagccggtccttgtttttcaagtgggtttttcaggtgatatgacgcaagcgcgcctggcttacgccgcgctctgcgtcgccaccggtgccggcttcgtcgccttggtggcggccgcgaccggcgcctcgtatggcttgtaggcgctcttggcgatgtcggcgtacatttccgtgagcttcgtcgcttcggaaacaaagttctcgtaggcggacttcgcatagccggtctgcaactcgaagacggcttcgaagctgcgggcgcctgacaaggtctcgaaatgcgtgaccgcgtcctggaacgatttcttggaatatttggtggcttccgtcgcgatcgcctgcaggcccttggcggtctcggagtagcttttcagcaccgcgtccatggcttccttgctcttgcgattcgtatcctcgaaattcagcatgactttcctccttggcgtgcgcgggcctccttgccctgcctcgatggcgaaggttagctgcaccgcacacgaagtcaagcgactttgtgcgatgcaaaacaatcactgattgcacccatcggcgcaaattaaccccgctctcagagcaacgtacatctttaattgatttctctaaaatatatcaggcggccgcaaccacaggcttcagacaaaaatccggttgcgggccgccgatagcattgccctgccctcaatcgagcagatcggccgggacctttccgccattctccgacagcttcttcaaaagcgccttgtgcaggaacacgttcatcgtcgccgtgtcgttctggtcgccggtgtatccgagttcggccgccagttccttgcgctcggccaggctggcgtccatgccgaccgccttcatgagatcgacgatggaacggcgccactgaagcttctggccactcttcttgacggcggcgtcgagcaccatgacgatatcgaccgatgtcgacggggccgaggtggccggagaggtcggcgcaggggtcggggacggactcggggcagcggatggcgatatcggcgcctgcgctggctcgatcttcggcgcggcggccggcgttgcctcggcggctttcgcctcaccccagattgcgtgcttgatcttgtcgaaaatacccatgtccggtttccccttgatggtgttcgagcacatgctcaaagccaagatggggcggcaggcagggtggtccagagcggaccggcaatttcggccgggccgcgacgccgcggcccaggcacaatcgtcgcgagacggacctcgcgaccggatcagagatcgacgtcgaggatcgccatcgagaagttgtaggagcggtcgccgtcctcgtcatcgatgtagacgacgcccagaaattcctcgcccatgtagacttcagcggaatcgttcttgcgcggacgtgccttgacgatcatttccgggttgaacgtgcgtttgaaataggcgtcgagtttcttgatttcttcgggcttcactctgcatctcctgagcggtctcaatggccgctttttttgcatgggaaagatgggcctgtaaaggcgcggagacagccctcgggccgctttccccgccgttcttgtgcccatgttgtcgctttgggcgacgcgaaagcgcctagatgtcggcgccgatcacctggtccaggatcacctgatccatgagcctggatggttccgaacagccggccgtgccgaccaccctggcgggcacgcccgcgaccgtcgtcttcggcggtaccggcttcaggacgacggagccggcggcgatgcgcgagcattgaccgatctcgatattgccgaggatcttggcgcccgcgccgatcagcacgccgctggcgatcttcggatggcggtcagccccctccttgccggtcccgccgagcgtgacgccatgcaggatcgagacattgtcgccgatgacggcggtttcgccgacgacgaggcccgtcgcgtgatcgaggaagatgccgcggccgatgcgcgccgccggattgatgtcggtctggaaaacgctcgatgagcggctctgcagatagagcgccagatcacggcggccgcgattgagcagccagtgcgccagacgatgggtctgcagcgcgtggaagcccttgaagtagagcagcgcttccatgaagcgcaggcatgccggatcgcgatcgtagatggcctgaatatcgacgcgcaggatggcgccccattccggccagtcggccagcatctggtcgaaggtctggcgcaggaggatcgcctgcatgtcgggatggtcgagacgctcgcagatgcggtagatcacgcattcctcgagcgagcgatggttgagcacggtcgaatagagaaacgccgccagcaccggatcggcttcggcggcaaggcgcgcttcctcgcgcaggctatcccagatcgggtccatcgccttgagcgagctctgggtctccagagcacggatatctgacttcgcgaccatgaaggtctccctgtattccgacttgctgtttcgcccaggcgttactctatatagggcaaaaaacggctgatataaatggggcgacggaaacagctttttgctatttgcgtcccttggtgaacgatcggccttgcgcgcccctcccggatgccaacccggatgtcaccggtcggcgagatccgcgtagaagtccaggacggccgccttgaagaccttgtcgccgacggcaagcatatggtcgcggcccggtatgtcgagcgcgcgggcatcgggcatgagggccgccagttcctggggggagccggcgatgtcgtccttggttccgaccgcgaccagcgtcggcgcctcgatcttcgccatatcggctctttcgaccagatcgcgcgagcccctgatgcaggcggcgagcgcctggcggtcgcttttcgtctgctcggcgaaggcgcggaacatgcggccgcgcgcatgggtgacaccatcgatcgacggcgccagcagcgcatcggcgatcggatcccaatcgccgacaccgtcggtcatgccgatgccgaggccaccgagcaccagcgaacggacgcgatcgggccacttgagcgtggcgaaaaccgaaatgcgcgcgcccatcgagtagccgatcagattggcttgccggatgccgagatgatcgagcagcgcgatggaatcggccgccatgatccacggccgataggcttcggaatcatgcggcttgtcgcttgcgccgtggcccctgttgtccatggcgatcacgcggtatccggcctcgcccagcgttttcagccagcccggatagacccagttgacgctggcggtcgaggcgaaaccgtggatgagcagcaccggcggtccctcgggatttccctcgtcgaaataggaaaggttgaggccgtcgtgctcgaagctggaaaaggcaggcgtattcaagttcatcggggcagtcctgttttgccgggaccatattttatcgggccgcgaacgggaacccccgcgccgatcaaaaagcacggccagaaagcgccttccaaaaacgatcgggcgcctctctcctttggctcgacacatttgcggcgacgcactataaggtggccacgttttcaaaggcattcggagatcctcatggccggtcacaatatcccccacttccagaacgacggcggacaccgcgtcatcgaagtcggcgtgaaggaattcatgtgcacaggcgcctccattccctacgaccacccgcatatcttcatcgacatgggcgacgaaaacgagaaggtctgctcctactgctcgacgctctatcgcttcaacggcgcgttgaaagccacccagacgaaccccgctggctgcgtcttccacttccaggtcgcttaaatcaccaagacacagattggatcgaccatgtcggtcgaacatgccgccatcatcggagcgggcgtcgctgggctaacggcggcgctggcactcgccaggcatggcattcgctccgagatcttcgaacaggcgcccgatctgaccgaggtgggcgcagggctgcagatatcgcccaacgcctcgcgcatcctcgacaagctcggggttctcgacctgttggcgccgatctggctcgagccgagcagcattcgtctcatatcaggtccgtcaatgcgcgaactggcgaccgtgccgatgggcaccgccgcgcgggcgcgctgggaggcaccctacggcgtgctgcatcgcgccagcctgcaagccgcgctgcttgaagccgttcgagcaaacccgctctgcacgcttcatcttggcgcacgcatcgaaggcggcgacgttgccgggatcacccgcgcgggcggcgtgatcataggggcggatggcgtctggtcgaagacgcgcgacctcatcgccgacagcccctcctcgcgtttttccggcaatatcgcctatcgcttcacggtttcggcggcagatgcgcaaggcattctcgaccgcgagagcgtctcggcctttctcgggccatcggcgcatctggtggcctatccgctgcgcgaaaccgacagcttcaacatggtggcgatcacgaccggccatgccggcgcgcgcgaatggctggcgcagccgacgcagacgcaacggcagcaattgctttcgcgcttctcgcgctggaacccggcgctgctgcagctgttggaaaaatccggcgcgatgaccttctggccgctttacgaggcgacgcgcggcaagtggcagaacggccgcgacacggtgctgatcggggatgcggcgcatgcgatgatgccgtttgccgcgcagggtgccgcgatggcgatcgaggacgcctatgagctggcgtcgttgctggacaaacgtcctgccgccgaggcgctgccgctcttcgaagcgcatcgcgtgccgcgcgtgaaccggctgcgccagcgcggcgcgttcaaccagttcgtctatcacgcccgcggtccgttccggatcgggcgtgatatcgtgctgtcgctgaagtcgccgcaaagtctcgcggcggagctcgactggatctacgcttaccgcgccaaggactgatcagaccgccttggcggcggcaaagccgcgctcgatgtcgagcttgatatcggcgacgtcctccaggccgatctgaaggcggatcaccggcccttcggtcggcgccttggtgacgcggcgatcgttcaggttgacgtggaccgccaggctttcgaaaccaccccaggaccagccgaggccaaagatcctcagcgcatcgaggaaggcatgcgccttcggcttgaaggcggccgggccgtcggccttcagcacgaaggagaagatgccgctggcgcccttgaagtcgcgcttccagagctcgtggcccgggaaactcggcagcgccggatgcagcaccgcggccacttcctcgcggccttccagccatttggcgatggtgagcgcgctctcgtagtgtcgctcgaggcgcacgcccatggtgcgcaggccgcgcagtatctggtaggcatcgtcaggcgcgccgcagatgccgagcgtgatattggcctcgtgcagctgctcccagtacctggcattggccgaaaccgtgcccatcagaatatcggaatggccggacggatatttcgtcgctgcgtggatcgagatatcgacaccataatcgagcgggcggaagtagaccggcgtcgcccaggtattgtccatcgtcactatcgcgccatgcttatgggcgatcgcggcgatcgcgggaatatcctgcatctcgaaggtgttggaacccggcgcctcggtgtgcaccagcctggtgttcggcttgatcagcgtctcgatgccggcgccgatcgccggatcgtaatattcgacggcaacgcccaggcgcttcagcatcgtgtcgcagaaatggcgggtcgggccatagaccgaatcgacgaccagcgcatgatcgcccgacgacaggaaagccaggaagggaacggtgacggccgccagacccgagggaacgaggatcgttccggccgacccctcgagcgcgtcgatcgcctcgcagagagcgtcggtggtcggtgtgccgcgtgtgccgtaggtatatttctgcgcccgctgttccatcgccctggcagtcgggaacagcacggtcgaggcgtgcacgacgggcggattgacgaagccatgatagtcgaaaggatcattgccgagatgcgaaaggcgcgtgttgatgccggcgttttgaagcaggccgtctttgtctgtcatgtctaattaagcctttggaaagaacgctctttaccgaactcttgtacctctcccgaggcgcggtcaaccccgttgacgtagcgtgaagcaaaccgggagaaccgggcggtacggtaattatccagatatatcagtaagtttacgcgatttttttcgccaaacgctgccttttggataatcatttgctcattttgtgagccacccccagcaaattgccgaaatatcacgcaatcttgtggcgcgagacttgaccgtggtgccatttccgactgtgatagacccactcgcgccgggaggatgtcgggttgcttggggggtctgcatgcttctgccgacgctcccacaataaacaaaagataacggaaaaaaggttgggaaaaatgaagattaagcttctgtcggtcgccattggcgcagcagtcttcgcacttggcgcttcggcagcttcggcggcgacgctcgcggacgtgaaggcaaagggtttcgttcagtgcggcgtcaactcgggtctcctgggtttcgcgcagcctgacgcttccggcaactgggccggtttcgacgtcgatttctgcaaggccgtcgcgtccgccgtcttcggcgatccgaccaaggtcaagtatacgcccctctccgccaaggaccgctttccggccttgcagtcgggcgaagtggacgttctgtcgcgcaacacgacctggacgatcaaccgcgataccgctctcggcttcaacttccgcccgatcacctattacgacggccagggcttcatggttcgcaagagcctgaacgtgaagtcggctctcgagctttcgggcgcggccatctgcgtacagtccggcaccacgaccgagctgaacctcgccgactacttcaaggccaacaacctgcagtacaatccggtggttttcgaaaagctcgaggaagtcaatgccgcctatgattcgggccgttgcgacgtctacaccaccgaccagtccggcctctattcgctgcgtctgacgctgaagaaccccgacgagcacatgatcctgcccgagatcatctccaaggagccgctcggcccggccgttcgccagggcgacgaccagtggttcgacatcgtttcctggacggcttacgcgctgatcaacgccgaggaattcggcatcacccaggccaatgtcgacgagatgaagaactcgccgaaccctgatatcaagcgcttcctcggttccgaaaccgacaccaagatcggcaccgatctgggcctgaccaacgactgggccgccaacgtcatcaagggcgtgggcaactacggcgaagtgttcgagcgcaacatcggccagggcagcccgctcaagatcgcacgcggtctcaacgctctgtggaacaagggcggcgtccagtacgcgcctccggtccgctaagctttcgttacaaatgccggaaaggcgggaaaccgcctttccatattccaagaaaaaagcccaaaaacgggcacacaggggattaggctcggcatgacgcaagaggctgtgcacacgacacctttgccggagagccgctggacgttccagtcggcactttacgacccgaaattaagaggaatattcttccagcttctgaccgtggttctgctcgttggtttcgttgcgtgggtcgctcacaatacggcgctcaacctgcaacgcagcaacacggcatcgggtttcgcatttctcaatggacgcgccggcttcgaaatcggccaatcgctgatcgcctattcgagcgattcgacctatggtcgcgcgctggtcgtcggcattctcaacaccatcctggttgccatcaccggcatcatcaccgcgacgatcatcggcttcgtcgtcggcatagggcgcctgtcgcacaactggctgatcgccaagctgtgcaccgtctatgtcgaggtgttccgcaacattccgccgctgctggtcatcttcttctggtattcgggcgttctagcggtgctgccgcagccgcgcgaatccctgaacctgcccttcaacatgttcctgaacaatcgcggcctcgccttcccgaagccgatgttcgaaacaggcatgtggttcgtcctcgcggccctcttgatcggcatcgtcgccaccgtgatcacggcgcgctgggcgcacaagcgacaggccgccagcggcaagcagttccatacgatctgggtgtcgatcgccctgatcgccgggctgccgatcctcgtcttcctggcgaccggtctgccgatcgccttcgacgtccccgtggccggcaagttcaacctgaccggcggctccgtcgtcgggccggaattcatgtcgctgttcctggcgctgtccttctacacggcggccttcatcgccgagatcgtgcgtgccggcatcaggggcgttccgaagggacagtcggaagcggccggggcgctcggcctgcatccgtcctcggtgacgcgcctcgtcgtcgtgccgcaggccttccgcatcatcatcccgccgctcaccagccagtacctgaacctgaccaagaactcgtcgctggcgatcgccgtcggcttctcggatctcgttgccgtcggtggcacgacgctcaaccagaccggccagtcgatcgaggtcgtcgtcgtgtggatcgtcgtctatctcggactcagcgtgcttacctcgctgttcatgaactggttcaatgccaagatggcactggtggagagataagatgtccggctcgaacatttccttcgtccgcaatgccattctggagccgcaaccggctccggcgagccagcgcggcgcagtcgcctggatccggcgcaatcttctggccacaccgaaagacgtcgtgctgacggtgattgccgtcgcggcactggcctgggtgctgccgcagatgatcaactggctgttcatccaggcggtctggacgggaacggatcgcacgttctgcgccacgacggtccagggcggcacgcagccggacggctggagcggcgcctgctgggccttcgtcaacgccaagctcgatcagttcgtttacggccgctatacgctcaacgagcgctggcgcccgacactggtgttcatcatgttcgccgcgctgctgacgccgatgctgatcccgtcgatgccgcgcaaggggctgaacgcccttctgctcttcgtcgccctgccgctcgtctcgatctggctgctttacggcggcttcggcctcgagatcgtcgagacaccgctctggggcggcctgctcgtgacgctcgtcgtctccttcgtcggcattgccgtgtcgctgccgttcggcatcgcgctcgccctcgggcggcgctcgaagatgcccgtggtgaagatggtctgcgtcatcttcatcgaagtcgtccgtggcatcccgctgatcaccgtcctgttcatggcgagcgtcatgctgccgctgttcctgccgcagggctggaatgtcgacaagctgatccgtgccatcatcggcgtgtcgatcttcgcctcggcctacatggcggaggtcatccgcggcggtctgcaggccattccgaagggtcaatacgaaggcgccgattcactcgggctcggctattggcagaagacgcggctgatcatcttgccgcaggcgatcaagctcgtcatccccggcatcgtcaacaccttcatcggcatgttcaaggatacgtcgctggtttcgatcatcagcatgttcgacctgctcggcatcgttcgcctgaacttctccgatggcaactgggcatcggcgttcacaccgttgacaggcctgatctttgctggcttcgtcttctggattttctgcttcggcatgtctcgctattcggtgttcatggaacgccatctcgacaccggccacaaacgataagatcaagggaaaaaaatcatggctgaagcccaacccaagaagatgaccgtgtcggcaaccgatgttgccatcgagatcatcggcatgaacaagtggtacggtgacttccacgtgctgcgcgacatcaatctgaaggtcatgcgcggcgagcgcatcgtcatcgccggcccgtcgggctccggcaagtcgacgatgatccgctgcatcaaccgcctggaagaacaccagaagggccagatcatcgtcgacggcacggaactgaccaacgacctgaagaagatcgacgaagtgcgccgcgaagtcggcatggtgttccagcacttcaacctcttcccgcacctgaccatcctcgaaaactgcacgctggcgccgatctgggtgcgcaagatgccgaagaagcaggccgaggagatcgccatgcacttcctcaagcgcgtcaagatcccggagcaggccaacaagtatccgggccagctctccggcggccagcagcagcgcgtggcgatcgcccgctcgctgtgcatgaacccgaagatcatgctgttcgacgagccgacctcggcgctcgacccggaaatgatcaaggaagtgctcgacaccatggtcggccttgccgaagagggcatgacgatgctgtgcgtgacccacgaaatgggctttgcccgccaggtcgccaaccgcgtcatcttcatggaccagggccagatcgtggagcagaactcgccggccgagttcttcgacaatccgcagcacgagcgtaccaagctcttcctcagccagatcctgcactaggactgcgacaaccgccgaacatcaacaaacccgcccggcagcgccgcggcgggtttttcattcatgcgcggggtgggcacctgggaacgaaggcgcctctcggcgtcatcctcggccaacgtgccgatgatccaagcacaccgccggaaatacaacggtgccggtcaagccgatcgaacgaaacaaaggcgccagatcgggccgcaaggtgccagctatccatcccgtcgagcagatggagagaccggcagatgctcggcacaagaccgtgcatgacgacggaaagggtggctggcgccggaagcccgtccaggcgacgcccttccccgcctcgccgtggcagccaggcgggacggcggatgccgtcccgggatgctcggagccgaaatcaggtcttcagcttggcattgcagaggctgtagtagccgccgcccttctggatccatttcaggccgttcagcgtattggcgtccttgttggtgcggtaggaatcgacgcaggtgtgcatgcggcccttgccgggtgtttccttggcgtattggggagaaatcgccgtcgggaaggtcacgcccttgggagcggtcatcgtcggcttcgcgggctcttcgccggtcgccatcgagacgtcgggctcggcggtcgcatccgggccgcactgcgccttgcggaagtcgttccacttgatgtccttggcggaaccatccgcctgcgccgacttgtacttggcgctgcactccttcatcgagagcgccgacgagggcgtggcgaaggcgagcgcgccgagcagggaaacagaggcaagaattgtcagatgcttgatcatggtcattcctccaaagcctaacatgcaggctaagccactcttatcccggcgcattttcttgtcaacgcggcttttttggtggctgcgcgaatattcctcgacacctcgctggggtggtgcggggacggatggacccgcaggccgcgccctgccccgcgccgtcctttcacgtgagcgtcagcgggtgtataatcgcgccgctggttcttccctgcatttttatggaggatgacatgcgccaacccgacatgcaaaaagtggatgccctcgtcggccgattggtcggcgatatcggcgccgccgtatccggctccctggtggtgctcggcgacgacgtcggactgttcaaggcgatggccgacggcgagccggtgacggcggcggagctttcgaaaaggacagcggtcaaggaacgctatctgcgcgaatggctttcggccctcgccgccgccgattatctcacctacgacgaaaagaccgaccgcttccggctgacgccggagcaggcgctggttttcgccgaggaggacagccccgccttcttcaccggcgcgttccagctggtgcaggcgatgtggaccgacgaacccaaggtggccgatgccttccgcaccggcaatgggctgggctggcacgagcacagcaactgcctgtttcgcggcaccgagcgcttcttccgcaccggctacaacaacagcctcgtcaccgaatggattccggcgctcgatggcgtcgaggacaagctgaaggccggggcgatggtggccgatgtcggctgcggccacggcagttcgaccatcctgatggcgcaggcctatcccgcctcgcgtttcgtcggctacgactatcacatgccgtcgatcgaacgcgcccgcgccgccgccagggaggccggcgtttccgaccgcgtcagcttcgagcaggcgtcggcctcgaccttcccggccgggcgctacgatctcgtcgcgatgttcgattgcctgcacgacatgggcgatcccgtgggtgcgggaaagcatgtgaaggagacgcttgcgcccggcggcacctggatgatcgtcgagcccttcgcgcatgatcacctcaaggacaatctcaacccggtcggacgcgtctattacggcgcctcgacgatgatctgcacgcccgcctccatgtcgcaggaggtcggactggcgctcggcgcgcaggccggcgaaacccgattgcgcaaggtggcgctcgatgccggcttcgggcatttccaccgcgccaccgaaacgccgttcaacatggtgttcgaggtccgcgcttgagaagaagccgaaaccgacggtccggacacgatcgaagcatgagcaaacgctgaaaatatccgttaactatcaaagcgatagggaaaagatcagcacatggccatttttctgcgttttgccgcttgcgggaatccgagtgcctgattataagggcgccaccacgaaggaagcgcccttcgtctatcggttaggacaccagattttcattctgggaagaggggttcgactcccctagggcgtgccatcgtggttgatttcattacattattgtgaatacggcggaaaacgcgcccgatgcgcaaccggacatccggtcgcgtaccctctcccacatcctatcgccctgccgtctcccgtcgagtgttcagccgtcggcccaacgtcgtcattcacggggggattcggcgagacggcgcgctccagcggtgctcgccagaaagcggctggcgatccacatcgccagcgcgataccgctgaaagcggctcccaggacgcagattcccggccagccgtaccgcgcataggtcgccgtggcggcgatcgcgccggcagcgctgccgaccgagtaaaagatcatgtagcctccgatcagccgaccgctcctgtgcgggtgcaggctgaccacgacgccgagattggtgacgtggacggcctgaaccgcgagatcgagcagaaacacgccgacgagcatcaacgaaatggagcgcggcaggaaagcgatcattccccaggaggccagcaggagcgccagcgacgcccctgttgtccaccggccgtagcccttgtccgccagccttcccgcgcatgtcgctccgatcgcgcccgccactccgaccagaccgaacaggcctatcaaagtcggggaataagaaaatggcggcgcgctgagcggaagcaccagcgcggtccagaaggtgctgaaggatgcgaagatcagcagcgccagcatgccccgaaagagcaggaccggttcacgcaggaaggtggatggcacggagaggagagcgccgagataggtgtccggatgccgcgccgccgtctggcctggcagcgtccgcacaagcatgccgatcatcgcgaccatgagcagtgccgatatcatatagaccgcccgccatccgccgaaatcggcaatcgcgccggcaacggatcgcgccgcgaggatgcccgtcaccacgccgctggtgacagtgccgaccacgccgccgcgttgagccggcgtcgccagcgccgcggcctgggcaatcaggatctgaacgagaaccgccagcaatccgaccacgcccatcccagcgagcagcatcgctttcgcgccagccgtcgcgacgacgacaagcgcgatcgccgaaagcagcccctggacgacgatgagctttcgccggtcgacgagatcgccgagcggcacgatgaagatgaggcccagcccgtacccgacctgcgtcagcgtgacgacaaggccgatgccggaaggcgagatgccgatatcacgcgccatgaggtcgagcagcggctgcgcgtaatagatattggcgacgctcattcccgctgccgtcgcgacgatcagcgtttgaattctcgacaatccacgggccggagccccgttcggggcatccgcggttttctcgctcatcgggtcttcctcgcgatttcagttcagtgcgccgttgaaatcacttggttcgctgcaaatccagttctaagatagaaccagattacgaggggagacctggtatcgatggtaaagcgcgtcagcctgtggaatgccggttgcccggtggcgcgggcacttgatgcgatcggcgactggtggtcgttgctgatcatccgcgatgcgttcgatggcaagcgccgcttcggcgagttccagaccgggctgggcatcagcaagggcgtgttgtcgacgcgactacgcgacctggtgaagcgaggcatcctcgaaaccgtgccggcctcggatggaaccgcctaccgagactatgtcctgacggataagggacgcggtctgtttcccgtgatcgtcgcattgcgccagtggggtgaagaccatctgttcgccgacggggaggttcgttcttcgctcgtggacagggagaagcgcgcgccggtcgcgcggctcgaggtccgatccgccgacaatcgtccccttatctggagcgagaccgaggtgacgggctgacgtcgtcccgaaacatcagccgggcgacagccggatggatgccagccactcttccagcatgcgcctgatggcctgctccgccgtgccgttgcggttgaaggcccaccaggtgtgtgcgccctgccagatggcggccatttgccaaccgagcctttgtccttcatcccgatcgccggagagacggcggccgagcgcatcggcaagcgattgtccccaagccacgccccgggcgcgcagggtgggattgcggatatcttccctcaacagcagcaacccgtcggccgcatcgcgatccgcctcccctggcggcatcagccgcatcaacaggctgatggcccctttggggttcagctcctcttgcgcgtcggccgtctcggtttcgatttgcaagcggtcccaggccctgagcaggaccgcctcgacgagatcgacgcggctgcgatagcgctgcaccagggtcgatggcgacagcccgcaggcctcggccgccagcgcgaatgtcaggccgtcggggccggtccggacaatcgtgtcgaacagatcgtcgagcacctgctcgtcggaaatcatcttgtgtcttggcatgatcgtatataaacatatgttcgtttatttatcaaggaggagaccatggccagaattctcggatacatcgcggcgagcctcgacgggcttatcgtctccggcgaagggtcgctcgactggctctatcaatatgacggcatggacctcggggagcacgactatgcgctctttctcaaacgcatccgtacggtcgtcatggggcgcgcgacctatgacttcatcgccagcgagccgtcgccctgggcctatggcgatcagcgggtcatcgttgtcacctcccgcccaatcgacgatccgaaagggccgctggaggttcgcggcgacatcgacgcgttgataggcgagctgcgcgcgctcgacgacggcgatgtctggatgctgggcggcggaaggctgcagatggcgttcatggaacgcggcgcgctggacgagatcgaaatctacgtgatcccggaactgctcggctccggccagccgctctttccgctgaccggcttcagggccagccctgagctgatcagcgccgcgccgatcgcccgcggctgcgtccgccttcactaccgtttgtgacgatgccggatttcagcgcgggggtgcccgctcatggcagtgagacgccgtccgacagcaggcgctaagtggacactttgtcagaaacgactacgctggaaattctgttgaaagcagccccatcataaggtcgtcatgccatttgccatctacgaaagcggtctcccgctctcgtccttcgacgatgaacccacatttcgcgtaggctcggatcgcacgttcgttgtaggcaagcacgcgtatcccaatgcgatggagtttcagctcacggaaagcatgttgcaagagcaggcgaatagcttcggtgccgatgccttttccgagaaatgacgggtcatatattccgatggccatggacgcacgacgatcctggtcattgatgctgtgcagcttgatctctccaatcagccgcttttcgacctctattatccagacatggggactttgcgtctgagctagggcccattgctcggcggcgtgtcttgtcattggcaacacatctgccgaactgacaccgaacatcttgacgatctcggcatccgttcccagcgcaaaccgcgcctcggcatcatcaggtgaagccggtctcaatcgaacccttccaacgcccagaaccatcatcgaagcaatccagcgtgttaccgtcgtcacgccaccttatgcaaaacttgtctgatcgcaatgtacggttggcctgaagcagtcgttcgcctttggccgcttgcttatctcgtgggcaagcgcttgctgtcttcaggtgtcgtcatttcttcttcgcttgatcgtgatgccacttgatggcgaagaacatggccacgcccaacacgagaatcttgagcggaaagaatattatagggaaccaatcccacattttgggtacttccgagctgttatccgacactatctgccggtcaggaacagctatctcaaaattacctcatccgacatcagccatgttgacgcagatgcgatcttccacgcgcacccgccctcagtcgcgatattgcggttcttccgcgtcgagcatgcgcttgatcgcctccagatgcagccgcgccgattccggatcgccctcgcgcatctgccggtaggcggcttcggcgatatcgggatctacgggcaagacctggcggccggtggacagcgccagcgtctgcacctggcaggcgcgctcgagatagtagagatcgtcccaggcttcggcgatgttgggcgccagcaccatgacgccgtgatgcttcatgaagacgatgtcggcatcgccgatcgcattggcgatgcggtcgccctcgcgctcgtccagcgccaggccgttgtaatcgcggtcataggcggtgcggccgtagaatttgagcgccgtctggccggcgaagatcaacggctcgccctcggtcatcgacagcgccgtcgcatagggcatgtgggtatggaaggcgacgcgggcgcgcggaacgcgggcgtggatgcgggcatggatatagaacgcagtcgcctccggctcgccttctcccgagacgacgttgccgtgaaaatcgcagatcagaagcttcgaggccgtcaactcgcggaaggcgtagccatagggattgacgatgaagaggtcgtcatagccgggcaccagcgccgagaaatggttgcagatcccctcctccagcccatggcgcgccgccatgcgaaagcaggccgccagatctgcgcgggcctgccagacctcctcggtgtcgagttgcggctggttagcgccggaggtgccggttgccgcggaggacttgttcagggaatgcgccatatcgatgctccattgcgaatagatgtcaggcggtggaaataccggacaatcggcagccctcgccggacgtgaccgcatggtagcgtgccttgcgcggaagaccagcgtcgctgcaagccaatttcgcgcggatgccgcggcatggccggctcgccggcacgaaatcccaggctgcgtccagtttgctcagcgagcgatggcgccgtcgatgacccgcagctggacgcggcgcgagccctgatagtggttgtcgccgagcgagcccgccacatgcaggttggcgccgcgcgagttcaggagcaggttaccgagctgcgtatcggcggcgcgaaacgcgatgccgtcgaggcgagcgccatccatggcttcgagcgtcaccttcacatgcttttcgccgacgatcctcgagtcgcggacgcggtgggcggggatggcgaagatcggctgcgaatggccggagccgtagggacccgccgtttccaggcgatcaatcaaatcaatcgtcgcaccgctggcgccgatcgcgccgtcgatcttcagcgtctcgttggccaccagcgccgcaacggtcttttcggcgcgttccgaaaagaagccccgcaggcggccgagcttgtcgcgctcgacggtgaggcccgccgccatcgcatggccgccgcccttgaccagcaacccctcgtcgaccgccgcgcgcaccatcttgcccatgtcgaagccgttgatggaacggccggagccggtgcccttgccgttcaaatcgaaggcgatggcgaaagccggacgcttgaacttttccttcagccgcgccgcgatcaatccgacgatgccgggatgccatttttcatgcgcggtgacgatgacggaggcgccgctgccgtcgccatattcggcataggcctcggcctcggcttcctgcagcatgctggcttccatcacctggcggtcgcggttgagctcgtcgagacgttcggcgatggcctcggcttcgccggcatcatccagcgtcaatagccggctaccgagcgccgcgtcgctgatgcggccgccggcattgatccgggggccgatgaggaagccgaagtgatatggggtcaccggcccggcaaggcccgccttgcgaaacagcgccgaaagaccggcattgccctgatggcgggcggcgatcaggcccttgacgacataggcgcggttcaggcccttcagcggaacgacgtcgcagacggtggcgagcgccacgatatccagccattgcaggaggtcgatgccgcgcgccttcggatggccggcctcgcgcagcagccggagcgtcgcgaccagcacgaggaagacgacgccggcggcgcacagatgcccctgccccgacagatcgtcctcgcggttcggattgaccagcgcatgacactcaggcaggtcatgtgtcacctggtggtgatcgatgacgacgacgtcgacatggcgcctggctgccgccgccagcgcctcgtggctggtggagccgcagtcgacggtgacgatcaggcgggcgccgttgtcgatcagctggtccatggcggcggggttcgggccatagccctcgaagacgcggtcggggatgtagatttcggatgtcacgccgaaatggctgaggaagcgatacatcagcgccgaggaggatgcgccgtcgacgtcgtagtcaccgaagatcgcgacctgctggcgggcattgatggcgtcggcgatgcgtctggccgccttctcgcagtcggtcagcttgtagggatcgggcatcagcgagcgcagcgtcggatcgaggaactcgaccgcctcgtcgacggtgacgccgcggccggcgagcacgcgggcgatcagatccggcaggccgtgcgtctgcgacatggcgagcgcccggttctgcccggcctggtccagccgcgagatccagcgattgtcgagaacggatttctcgacacccagaaaggcgcgctgtaccggatcggccgggatatccattgtgtcgtccgagtgtcttacgtgtttgccgtcgttacgtggttctaacgatcctggagcgcaaacgaaagatggcaggcagatcagtgctccgcttcccacaggatagatcaccgcacggtgacccacactctcccctcattctcgcccttgtggcgggaatccagccacggcgcgtctgcgccgtgagaagactctttcaggcccaaggacttgggcccgctggattcctgtgacaagcacaggaatgaggtgagaaggagaaaccgcgccgcagtcggtaagatagacctcagtcctccttcggacgctcgatgcggatcacctgcggttcgccgaccagatagccttcgaccttgatcgccgcgaccgccttgcgcaccgattcctcggtggtcgcgtgggtcacgaggatgatcgtctggtggtgcgacggtgcgaggtgctgcttggagcgctgcacgatggattcgagcgagatgtggttttcggccatgcgggtggcgacgctggcgaagacgccggtgcggtcgagaaccgtcagacggatgaaatagccgccctcgtggctctggatctgcgccttgcggtaaggtttgagcgacctggcggggtggccgagcaccggcacctgctgggcgcccgggcggctcttggcgatgtcggcgatgtcgccgagcaccgacgaggccgtggcattgccgccggcgccggggccgaccatcagcagttcgccgagcacgtcggattcgatcgccacggcgttggtgacgccatcgacctgggcgatgacgctgtcgacgggcaccatggtcgggtgcacgcgctgctcgatgccggtatcggtgcgctgggcaacgccgagcaacttgatgcgatagccgagttcggcggccgcatggatgtcctcgatcgagatgttggtgatgccctcgagatagatgtcgtcgacggagatctggttgccgaaggcgagcgtcgtcaggatcgagagcttgtgggcggtgtcgttgccctcgatgtcgaaggcgggatcggcctcggcgtaacccaggcgctgcgcttccttcaggcagtcggcgaacgacaggccttccttctccatcttggtgaggatgtagttgcaggtgccgttcatgatgccgtagacgcgcgagatcgtgttgcccgtcagcgattcacgcagcgccttgatgacggggatgccacctgcgacggccgcttcgaagttgagcagcgcgcccttctcctcggcgatcctggcaagctcgacgccgtgataggcaagcagcgccttgttggccgtcaccacatggagaccacggttgagtgccgcctggacgccgatcctggccggcccttcggcgccgccgacgagttcgacgaagacgtcgatatcgcccttggtcgcgagttcctctggcgtgtcgaaccactcgatgccgccgacatcgatgccgcggtccttggtcttgtcgcgggcggacacgccggtaatcaggatcggccggccgcacgtcgcggcaagctggtcgctgcgctgctgaatgatgcgaacgagagaggcaccaacggtacccaagcccgcaacgccgattttaagggcatctgccatggatcgatcctgaaatatgtcatgaagggcagccgccggagcggctgccgaaagaactgattgtatcagcggtgagcgttcaacgagacgacgttgtgcatcgtctcatcggcggtggacatgaacttcttgatgttgcgcgccgcctgacggatgcgatgctcgttttcgacgagcgccagacgcacgtaatcgtcgcccatttcaccaaagccgatccccggcgccacggcgacgtcggccttctcgaccagcagcttggagaactcgaggctgccgagatggcggaacttttccgggatcttcgcccaggcgaacatggtggccgccggcggcggaacctcgaaaccggccttgccgaagctgtcgaccatgacgtcgcggcggcgcttgtagacgttgcggacttcggcgatatccgagccgtcgccgttcagcgcgtgcgtggcggccacctggatcggcgtgaaggcgccgtagtcgaggtaggatttcacacgcgtcagcgccgcgatgagccgctcgttgccaaccgcgaagcccatgcgccagccgggcatggagaaggtcttcgacatcgaggtgaactcgacgcagacatcaatggcgccgggcacctgcagcaccgatggcggcgggttgttgtcgtcgaagtagatttccgaatacgccaggtcggagagcacgatgatgtcgtgcttcttggcaaacgcgatgacgtccttgtagaagtcgagcgtggcgacgtaggccgtcgggttcgacgggtagttgacgatcaacgccagcggcttcgggatcgagtgcttcacggcgcgttccagcggcgggaagaagctgtcatccggctcgaccggtagcgagcggatcacaccgcctgccatcaggaagccgaaggcatggatcggataggtcgggttcgggcagaggatgacgtcgccgggcgcggtgatcgcctgcgccatgttggcgaagccttccttggagcccagggttgcgaccacctgcgtatccgggttcagcttcacgccgaagcggcgtgcgtaataggcggcctgggcgcggcgcaggccgggaatgcccttggacgaggaatagcgatgcgttcgcgggtcctggaccacttcgcagagcttgtcgacgatcgccttgggggtcggcaggtcagggtttcccatgccgagatcgatgatatcggctccgcccgctcgcgcgcttgctttcaaacggttgacctgttcgaaaacataaggcggcaaacgccggactttgtgaaactcttccatttctttccccacggaaacgcggccaccatgaccgcaaatcgaagttcgtcctaacttccggctgcttgcgacacgaacttcagaatcgccaaggccgtattcatcagactttcagcgcacggcgattctttgacggaccgccgacaggctgacgctttatcgggaaaatttcatcttccgcacctgacggaaggctttgcttgcaaacgccagagaaggcaaggccttatttggtgatttcggacagcgtttcagggccgtggtcggcggcgagcttgcggtattccgcaacgcggcgctggtactcggcttccgtgatggttcccgccttgcggcggttgctcagcgccgtcagcttctgctgcaggccggcggcttcctcgtcgttcatctgaacgttggcggccgtcagcggcgcgccgaagcccggatagccatcgctatagtgcgacaggccgctttcggtcggcgcctcgcccttggtggcgttcatgaccacggccgtcggggccgctcgcctcgcggcgatctcggccttctcttccggcgttcgcatgcatccggcaagcgccatggccgcggcggcgccgatcagggcgatgcgggtgacgtttgcgatggtacgaatgcctgtgttggtcatgccggaggttccaaatccttaagctgcttcgacttgttaaattcgcagcctgcacaaagcaatagcatgaaggcccgtcagcggaacttgttttcttgatccgagcggatacaacttgatttggagacagatgctgccgccggaggaaccgcgtgaccgacagcaaccaggacaagggcgagaagggccagggcccgggcttcgaggcgaaggatttcgatccttacatgctgaaggacccggagacgatggcgctgaacttcgcccgcgccctggaaaacctgggaaaagcggcgtccgcctggcttgctccgcgcgaaagcggcgagatccggacgaacaccgccgaccccgtcaccgacatggtcaagacgctctccaaggtcagcgaatactggatctccgacccgcgccgcgccttcgatgcgcagaccaagctgatgaccagctttttcggcgtgtggatgcgctcgatgcagcgcatgcagggcgaatcggccgagccggagcccgatcgcaaggacaagcgcttcgcggaccaggattgggagaagaaccccttcttcgagttcctgaagcaggcctatttcatcaccgcggactgggcggagaagctggtcaccgaaaccgagggtctggacgagcacacgcggcagaaggccaacttctacgtcaggcagatcacggcggcgatctcgccgaccaatttcgtcgccaccaatccgcagctttatcgcgagacgatcgcgagcagcggtgaaaacctggtccggggcatgaagatgctgaccgaagacatcgtggccggccacggcgacctgaagctgcggcagaccgacatgaccaagttcgccgtcggccgcgacatggcgctgacgccgggcaaggtgatcgcccagaacgagatctgccagatcatccagtacgagccgacgaccgagacggtgctgaagcgccctctgctcatctgcccgccctggatcaacaagttctacatcctcgatctcaatccgcagaagagcttcatcaagtggtgcgtcgaccaggggcagacggtgttcgtcatctcctgggtcaatccggatgcgcgtcatgcggccaaggactgggcggcctatgcgcgcgaagggatcgatttcgcgctcgagaccatcgagaaggcgaccggcgagaaggacgtcaacgccatcggctattgcgtcggcggcacgctgctggccgcgacgctggcgctgcatgccaaggaaaagaacaagcgcatccgctccgcgacgctgttcaccacccaggtcgatttcacccatgccggcgacctcaaggtgttcgtcgacgaagagcaactgacgcggctcgagaactatatggatgtgaccggctatctcgacggctcgaagatggcgacggccttcaacatgctgcgcgcctccgagctcatctggccctatttcgtcaacaactacctcaagggccaggagccgatgcccttcgacctcctgttctggaacgccgactcgacgcggatggcggcggccaatcacgcgttctacctgcgtaactgctatctcaggaacgctttgaccaagggcgagatggtgctcgacggccaggccgtatcgctgaagagcgtcaggatcccgatctacaacctcgccacccgcgaggatcacatcgcgccggcgaaatcggtgttcctcggcagccagttcttcggcggcaaggtcgatttcgtgctcgccggctccggccacatcgccggcgtggtcaacccgccggacaagaagaaataccagtattggaccggcggaccggccaagggcgaatacgaggactggctcatcgacgccgaggaagcggccggctcctggtggccgcactggcaggcctggatcgaggccaaggacggcaagcgggtaccggctcgcaagccagggggcgacgccctcaatgcgctcgaggaagcgccgggcagctacgtgctggagaaggcttgaacggcatcaccgatcggtgacgtcaatctactcaaacacaatcacgcttgccggcgatggcggcagcgggctgatcgcgatgtcgcggaagcccgccatcgacgccatctcgcgcaggtctgacgccgtgtaggcgtcgcccttcggtgtcgtcgccagcatttcgaaggcgaaggcggcggggaagtcgggcgagacgcggtcctcgttggggacgaactcgacggcgatcagcttgccggtggcgcttaggcttgggcgcgccttcttcagcagttccgcgcagccggcgatatcgaagtgatgcaggaagttcggcagcatgatgagatcgtagtcgctgccccagtcgacatcgaaggcgctgccggcgatgaagctgaaccgatcggcaacgcctgatgccgtcgcattctcccgcgtcagctccagcaccggcttccagtcgagcgcgacgatccgcgcccgcggaatggccctggcgatctcgatgccgaagtagccggggccggcagcgatatcgagcacctttgacggcggtgacggccatgccgcgacgtcggcggcaagcgtcctgcccgccccgccggtaaaggcgcccatggcgcgggcaaagcgcacccacacgggattatccggcgagaggttcgccaatccttcggcgccgccattgcgcacgcaggcggcggggtcggtcagaaagagcgcgagcatctgcggcgccgcgatgaaatcgatcgcggagcccatataggccggcgagtggcgatcgaggaacgcggcgctcgacggtgtcagcgcgtagacgtcgccactcttggtcaggaaacccgcgacgacgagatagtcgcacagaatgcgaacgccgcgctcggcgcatcgcatcccggacgccgccgccctggccgtctggcccgttccgatgacggtgaagaggtcgagttcgatcgccgccttgatggcggcggtcttgcggacggcgaacatcgcatcgaccagcaaggccggcgaaacgtcgttgccaggtgctgcttgtgccgaagacatcggcgtcacccctcggaagccctcgatgccacttcatagcacaatcgcaatatattttcccgctaatatttacatgaaatcggtgacatagccccacacagatcgacccgtgcgcgtcacattagaaaaaagcgaacaagaacaacatggttagcggacaaggtgaagaatttcacaacgggcgacgccgccgtaaagggtttggttaccataattcgtcattctccaagtcaaccggaaagcatggagaggccgcattttggccccgatgccccattaccggccccggcgaagaagtatccgtttccgtgtaccgccggcctcagtaacgagttgtgaaagacgagtgtcatggcgtttgcggtcgatgtgtttgccaataccaggccagtaggtacgcccatttctcgtttcagtcgcttattccgcctcatctcgggggcgggtctcatcggcgcaagttttgccgcctcggcatgggtcgtgacatcgatcgccaccgtgcccgcagccgcgccgccgccctacaagagcgccgccaacgacatcgcgctggtgcagcacgtcgcggtgtccgccgccttcaaggagcgccccgccgctgtcaaggaacgcaacatccgcgtctccaagttctcgcgcctgcaggcttacacggcggccgagaaccgtcgggccctgacgccgggcgcgatcaaggcggcattcgccggcaccaccacccccgtcatcgccgacgccgtgcccgtgcagaaggtgaccaccgtcacctttgcggccccggttgcggtcgcccagccgtccgtgacgacgaacccgccagcggaagaaaccgttgccagcgcatcctcgcaagatcgcatcatcattccgtcgaaggccgaagtcgcggcgctcgaagcccctgccctgctggcgctggcggcgtccgcgaagactgaagcccagccgagggccagcgtcgcggccgcgcccgccaagcccgctgccgccgaagtcgcgagcgtcgccaccaataccggcgcggcggtgagcgccaacagcagccaggcattcggcctcgtcctcaatgaaggcgatacgtccgcgccgctgccgatggcccgcccggacggaatgctgaagcgcgcgcctgcaaaggacggcgcgacacggccggccgaaccggtcctcgcctacgcgcggcccgatctcaccgacgatcagggtgaaatcccggttgtgccgaagcgccaggcagtcgcccgcgccggcgtcgccgtctacgacatctcggcgggcatggtctacctgccgaacggagaacgcctcgaggcgcattccggtcttggaaagatgcgcgacaatccaagctacatccgcgagaagatgcgcggtccgacgccgccgcatatctatacgctgagcatgcgcgaaagcctgttccacggcgtggccgcgatccggctcaatccaatcggcggcgcgggcaaggtgttcgaccgtgtcggcctgctcgcccacacctacatgctcggcgccaagggcgattccaacggctgcatctccttcaaggattacaagcgcttcctcgccgccttcaagcgcggcgacatccagcagctggaagtcgtctccagcctgccggacaagccgaaatccaccgtcgcctcgctgttctcgtcgcggtcctgatcggaccgcgacgttcactcatgcggcgtcagctcagcggccgccggccgcctcgacgatcatccgggtgatctcgtcgggatgcgagatcatcgacaggtggctggatttgagctcgatggtccgcgcgcccatgcgcttggccatgaagcgctccagatccgggttgatcgtccgatcctccgtcgataccgcataccagctcggcttcgagcgccatgccgcctgcgtggtcttgcccgtcagcaacgccttgttgaacggctgctgcacggcatggagcaccctggccttcgcctcggggatatcgccggcgaaatcgcgcaggaaggccgcctcggtcaatcgtccctcatcgccatcgaacacgatcccggcggaagccggcggggttggataggtctttgccagcgccgcatagtcctcgcccgcatcgggagcgcgggcggcgacatagaccagcgccgaaaccttgggatgcacgccggcctcggtgaccagcattccggagaaggagtgcccgacgagaacggtcggaccatcctggcgatccagcaccttctcgaccgaggcgacggcctccggcaaggtggtcagcggattctgcacggcggtggcgttgaaaccggccgcctgcaggcgagcgatcacctccgtccagcaggaaccgtcggcgaacagcccgtgcgccagcacgatattgcgtgccttggcgggctgcgccatcgcggccatgccgcgtgtggagacaagggaagcggcagcaccggcgagcagcgctgtcgagaaagtccgtctgttgatgatcatggtctttaccttcggctttgatcgatccgacccggcgacgggctgtgaacccgcgcatgatcggcaccggtcgatccgctcggcctgccggttctcttccgcgcaccgtcgcgacaccctgaaatgggccgccgtgccttggccaggacctgcagcccgggcacgatcgccggctggcgcaggtgaggatggccctcgtccagacatgccgtttatgcctgattttcctgacgcgaccggtatacgtcggcgccgaagcttttgttacagtccgccttgcagcggaaatttgcggccgggaccgccttgtcggtcccggcgcgatgcgctcagacttccttcaggctcggcgcattgtcgaggcggccgatcagcgtcgcgctcgcctcgttgaggccgatcacctcgacggcaacgtcgtgcgccttgaagcgctgcaccacccggtccagcgccgcgacggcagtgatgtcccagaaatgcgcgtgggtgaggtcgatcgtcaccgccatgccctcggcatcggcgatgtcgaaggcgtcgatgaagacgtcggcggacgcgaagaagacctggccggcgacatggtagacgatgcgctcgcctgcctcgtccgtctgcttgcggatcgacaggagcctggcgaccttgaaggtgaagaagacgccgctcaggaggacgccgacggtgactccgagcgccaggttggcggtgaagacggtgacgacgacggtcgccagcatgacgatgctggacgtcttcggatgcaccaccatggtcttgaccgacgaccagtcgaaggtgtcgatcgacaccatgaccatgatcgcgaccaacgccgcgaccggcacctgcgacacccacggcttgagcagcaccatgaggatcagcagcagcgcgccggcgaacagcgtcgagagacggccgcggccgccatatttcacgttgctgaccgtctggccgatcatgccgcagccggcgatgccgccgaacaggctggcggcggtgttggcgatgccgaggccggcacattcgcggttcttgtcgctggtggtgtcggtgagatcgtcgacgacactcgccgtcatcatcgattccagcaggccgaccatggcgatggccagtgccgggccggcgatgatgcgaagtgtctccagggtcagtggcacctgcggccaggcgaagaccggcagcgaatccggcagcttgccgagatcggcaacggtcaggaccggcagctgcaggccgacggaggcgacggtcaacagcaggatgcagatcagcggcgacgggatggcggtggtgatgcgcggcgcgatgtagatcaccgccaggccggcggccagcatggcataggcgatccagtcgccaccgatgatgtgcggcagctgcgccccgaaaatcaggatcgccagcgcgttgacgaagccggtgcgcaccgatttcgacacgaagcgcatcaggacgccgagccgcagcaggccgaagacgatctggatgatgccggcgagcaggccggcggcgaagagatagggcagcccgtgggagctgaccagcggcgccgcgaccagcgccacggagccggcggcggccgagatcatcgccgggcggccgccggtgaaggcgatgacgatgccgatgacgaaggaggcgaacaggccgacctgcggatcgacgccggcgacgaaggagaaggcgatgacctcggggatcagcgcgaaggtggcgacggcgccggcaagcatttcgcgtgtcggattggaaaaccaatcccggcggatggaggatacgtgcatgttgatgatatctcgcaaagcgtggcccaacgcgcccggacgggcggtcgaaaaatggcgtgcaggttttgcgttgtctggcggatcggcggccagaagagccacccggagtttcaccgggtccgtggtgagtgcgcccgttatagaccgcatttttgccgcgatgcaatatcaccgggccatttcgtgaccgcaggcgttcaggggccggacgcggacaaatccgtttcccttttgtactctttgcctcttccatttctcgctgactctctccatattccggccatggccaaatctccgaaaaactcccccgcccccgatggtttcgaggaagctccccaatccgcgttcgaaggcgcgcccctagagggttccgtcgccgattgggtgaagcagctggaggccgatgccgaggcatcgggcgtcgagacgcagcggcagatcgcgtccaaggccggcaagcaccgcaagaaggtggagatcgccgcgtccaaatccgcgcgtggcacctcgatgggcggctcgaccgacccgaagacgcgtgcggccgccggcctcaacccggtctccggcctcgacgtctcgcttgaagacgccgccgcactgaaggccggcacggcggtcaccgccacggtggaggcgctttcggcgctgatcgagagcggcaatccgcttttcaaggacggcaagatgtggacgccgcatcgcccggcccggccgccgaaatccgaaggcggcatcgagatccgcatgaactcggaatactcaccgtccggtgaccagccgacggcaatcaaggatctcgtcgagggcctcgacaatggcgaccgcagccaggtgctgctcggcgtcaccggctccggcaagaccttcaccatggccaaggtgatcgaggccacccagcgcccggccgtcatcctggcgccgaacaagacgctggcggcccagctctacagcgaattcaagaacttcttccccgacaacgcggtggaatatttcgtctcctattacgactactaccagccggaagcctatgtgccgcgctccgataccttcatcgagaaggaaagttcgatcaacgagcagatcgaccgcatgcgccactccgccacccgatcgctgctcgagcgcgacgattgcatcatcgttgcctccgtctcctgcatctacggtatcggttcggtcgagacctacaccgccatgaccttccagatggaggtcggcgaccgcctcgaccaacgccagctgctggccgacctcgtggcgcagcaatacaagcgccaggacatcaatttcgtccgcggctccttccgtgttcgcggcgacacgatcgaaatcttcccggcccacttggaagacgcggcctggcgcatctccatgttcggcgacgagatcgacgccatcaccgaattcgacccgctcaccggccagaagaccggcgacctgaagagcgtgaagatctacgccaacagccactatgtcactccgcgcccgacgctgaacggcgccatcaaggcgatcaaggaagagctgcgcctgcgcctcgccgaactcgaaaaggccggccgcctgctcgaagcccaacgcctggaacagcgcacccgctacgatgtcgagatgcttgaggccaccggctcctgcgccggcatcgagaactattcgcgctatctcaccggccgcagccccggcgagccgccgccgaccctgttcgaatatatccccgacaacgccctgctcttcatcgacgaaagccacgtcaccattccgcagatcggcggcatgtaccggggcgacttcaggcgcaaggcgacgctcgccgaatacggcttccgcctgccgtcctgcatggacaaccggccgctgcgcttcgaggaatgggacgcgatgcgccccgacacggtcgccgtctccgccacccccggcggctgggaactcgaccagtccggcggcgtcttcgccgagcaggtgatccgcccgaccggcctgatcgacccgccggtcgaagtccgctccgcccgcagccaggtcgacgacgtgctcggcgagatccgcgaaaccgccgccaagggttaccgcacgctctgcaccgtgctcaccaagcgcatggccgaggacctcaccgaatatctgcatgaacagggcgtgcgcgtccgctacatgcactcggacatcgacacgctggagcgtatcgagatcatccgcgatcttcgtctgggtgctttcgacgtgctggtcggcatcaaccttctgcgcgaaggcctcgacattcccgaatgcggcttcgtcgccattctcgacgccgacaaggaaggctttctgcgctccgagacctcgctggtccagaccatcggccgcgcggcgcgtaacgtcgacggcaaggtcatcctctatgccgacaccgtcaccggctcgatgcagcgcgccatggacgagaccgcccgccgccgcgaaaagcaggtggcttacaacaccgaacacggcatcacgccggaatcggtgaaggcgaagatctccgatatcctcgactcggtctacgaacgcgaccacgtccgcgccgacatctccggtgtgtcaggcaagggcttcgccgacggcggcaacctcgtgggcggcaacctgcagacccacctcaacgcgctggaaaaacagatgcgcgacgccgccgccgacctcgacttcgaaaaggccgcgcgcctgcgcgacgaaatcaaacgcctcaaggccgccgaactcgccgtcatggacgacccgatggcgcgcgaggagtccaaggccatggaaggcatcaagcggaacgccaaggcgacccgcgagtcccttctacccagcgggggtccggaggacgggacgagacaaccggctcgtcccggggtgcccggcagggcggatgagggggccacgccctcgacctccctcttccagaaacccaccctcgacgacatgggcccaggcaccgacaccgccatcccctcgcgcaccttccgccgcaacgacctcgacgaaatgaccgtcggccgcaccgaaaagcccgtgtcaggcaagctcccggaaaagcccgacgccgccaagagcaccaagcgcttctcccccctgctcgaaggccaacccgaccgcgacgacccgcgccccctggtgcgcggcaagaccggcgtcggcagctacgaggatgcgggtgatgtgaagcggcagaagcggacgaagggcaagacggggcggccggggcggtagaggcgccatcagagttgcgcacctataacatcgtcgcgaacttactatgtgcttaaagcgctcgaactaccagaaacagcatttcgttgcttcctgaaaaacagatcgatcgacagcgcctaaagtaaaatttctaaaaataccacttcaaatcaaacaagatccggataaaaatcccagaatcagtattttatacttttagtttattcactgctgactttttgagaaacgagattagaaataatacttgaatcttcattctcaatatacgccgcactcctgtcctcaatcatcggcgctggagaactatagtaccaatcccgtctccgaccatttccaagtttacgtgagcgcttttcaaatatgtcacggtaacgtctcggcgatataccaacaaatggacgaaagagaactttcttgtctgccagttcatcgtcaaaagtgatcgcatcggaattcaactcaaccgcatagctttttggatacggctcaagatatacaagcgacttaataccagacgaaacaatatgttttgcacacatgtgacatggaaatgtcgtgcaaaacatcgtcgcttttttaacggatacccctagcctagcggcatccgtgatcgcagacatttccgcatgaatcatacgcccgaactcaatgatgtccattatctgggactcacgaatatcttcggcgtccataatttcccgcaactgctctatagcgttggtcttcgacgaaagttccttcgacaaaaatcccgcccgactcatacgatcgaccaagtcatacaaaatttgtagtttacgcgactggtttgcgtctcgacctttctcgaagtcacgttgcgctccctcaccatcctccgcccaatatgttcccccaaaggctttgggaacctcgttgcagcccatcgataaaatttcaccagcgtcagtgaatatggacgccccgacctgccgtgataaatcaatagaacgcaacgacgccgcagcggccgtatacattccatattccatcttcgtcggagagtgaccgttatatccgaaaaacgcctcaaaaaaacgcttgagtgtttcgtcaatgttttgcttattcattccataaacaaagacatcaccgagatgaaagatgtttgatatcttttgaccaaagctaccaattccttcatcaaaatctttttttatgaggtcaattgcttccttttcgcattcgtccttgtcacgtgtcgcttcgttgaaatcctttattttactcgatatatcggcacgcctctctctttcagaagctgagaccgaaatctgtataaatttgcgcccgtaagtctgacgcattagttcgatttcttgcggccttttgaattggcgaatgatatatgcgtggcccaacgcaggtttttcaacgctgcccgtaatgaggcttctttctgcgcgaattcgagcgactgcaagagctgccaacgccgcagagctatctgcgatctcgcagactttgtctgcgtaagcaatcaacgaatgatatttggaactataggtactgttatcaactttcagaccagtctcgatagccatcattagatcggttattcgaagcgggacggattcatactccaaatgcttcagctcgcgaacgataacgttttgcacatagtctaaatcaacgccaatagggcctaccagcccaattacgagctcaggctttgcacccacatccatggaagtctccgatgcaaaatatgttgataattcgtgaactcaactgaaaataaatcgttatggggatagctgtctgagcgctacaatttagtgagtccatagcaacctttgatggaggcgacattgtcaaaaaattgcaatggtgtaaaggatgccaatgacttcgtagcagcgggtaaaacttggcttgaggaacaaatacacgttgcggcacgcaatttaagtaatcggccaagtgaacgacgaggcccatttgaaataagtgacgagttaatagaagacttgacggagcaattctcgttgaagtcgcaatgatattgcggttgattgctacaccgtgaaatcgctgaagatatttaaggaagacagccgcaaggtctgccttccttatttatttgcggctttattctatccaattctaatgttggtgtcgctattcggttacagcagcggcccagcttgtaattacggtggacttccaacactctcgacgtgacacaagaggtggttgtactcatctaaaacagccaacatattttattttccccaccctcccccacccatgccatcatcctctcatcccaccacggatacaccggcaggcgtgccggcgaggtggggtcggcgccgggtgtttgaggaggacgcaagctctctcatccggggttcgcagaaaatggtctccctccggtgacggcgggtcctgtcgcaagacgggcccgagttgagcccggacgtgcctgtgaggcacacatggttccgccgcgaagttgggcggaaaggcagagagaccggagttgcgttcataaaccgccgaacggggtgctggaaggcaccatattttttactctatcgaggtgatttccagcgccccgtccgagtgaagcctgaaccagcaagccacgggtgaaaccagccgcgtgacggcatcgccgcgcgccggagccgaagaggaccgcaatgccgcagcaccctcatgataatcccggcaaggaccttaaggaccgcctcggtctcgagttgatcgttgcgctggcggcgaggacatcggagatgctgtccatgccggtcttaacctgcccgatcaaccgctgccgccgcgctcgcgcctgccagcgcatcgccgtcaagggaagcaagctcgcctgcgtccatacgctgccctcggaatacacaccctgcttcaccgactatctcggctgggccgggatggtctgcgccgacgcccgcgatggggagcacggcgcgatgttccggctccttgacctcctgacgccgggcctgcgcggcaacacggtgtcgatcgcccgtgattgccttgtcggcgacgccccggcgctcgcctgccttgatgagacacttgcccttatcgccgagaaagcgccaccgttcctcgggcacccgcaggaggaagcgcaggccacaccctgatgcgatcgcgatcgccaccgcccccggcgcccccggcgccaccgccctgcccgccgacatcgcgttaaacttgcgtcaacgcccgcgtggcatatctgaccgcgagacacgcaggagactttcatggcattcgtcggcttcaagaacacccataatcatacgatctacgtcaaccccgcccaggtgctctatgtctcgacctatgaggaagacgtgacgatcatcgcctacgcggtcgcagacgccgccggcaagcccacggtctcctatgtacgcggaagcgccgacatggtgcagcagaagctcggcgccggcgccgcgcgctgatcccactcacctttaccgggaatccggctcgcctttaccgggcagccgcccagcgcctgggcattcgcatagatcggccatgaaagcgtgccgttgcgagacgcattccaggaatgggccagcggtggcggctcgtggttaccaatcgtcaagtgcttgaatctttggccattcccgctttggagcggctggtgtcagaataatgtcgcttgcattttgctccgtttgctggcaccaattgtgtactcgggcatttgcatgccggtgactggactgatgtggctgagccctccccgcgggagggtggcgtggggggacctcacgtgcgtagacgttctttccccgttcgtgaactactcgactgacccttcgcgcgctgagttaagatgagggagcgcgaaagtgaaagccgtccatttcctttcggggggatggataccagacagactacagggaaaaggacctatcccaatggccaccaaaggcgtcgtaaaattcttcaaccaggacaagggttttggtttcatcactcctgatggcggtgcgaaggacgtattcgttcacatctccgctctccaggcttccggcatccagtcgctccgcgaaggccagcaggttaccttcgacaccgagccggatcgcatgggcaagggcccgaaggccgtcaacatctcggccaactgatttcggtttctgcctcggcaggactgcgaaacggcgctccgcaagggcgccgttttcgttttccggcttgctggtgccgggcggctgcatcgggttcccgtgcgatgagggcgtgataccttaaatcggcctcccccattgatcgcaatggacgaacccggcatagctgcattatgtatgacgacaatttccgctaaggcccccgcaatggtaaactatatcgaagcctcctccgcgccatccaagaataccggcgccatcaggctctacggcgccgatgccttcgcaggcatgcgcaaggcgtgccaggtcaccgcccggtgtctcgatgcgctcgccgatatcgtcaagccgggtgtcacgaccgatgcgatcgatcgtttcgtcttcgatttcgggcttgagaacggcgcggttcccgcgacgctcaattaccgcggctacaccaaatccacctgcacctcgatcaaccatgtcgtgtgccacggcattccggatgccaagcctctgcgcgagggcgacatcgtcaatatcgacgtcacctatgtggtcgatggctggcacggcgattccagccggatgtacacggtcggcacggtcaagcgcgccgccgagcggctgctcgaggtaacctatgaatcgctgatgcgcgggatatcggccgtgcgccccggtgcgcgcaccggcgccatcggcgaggcgatacagacctatgcggaagccgagcgctgctcggtggtgcgcgatttctgtggccatggggtcggcgcgctgtttcacgacagcccgaatatcttgcattacggccgcgccagcgagggaccggaactgcgcgagggcatgatcttcacgatcgagccgatgatcaacctcggccgcccgcatgtgaaggtgctggccgatggctggaccgccgtcacccgcgaccggtcgctgtcggcgcaatacgagcacacggtcggcgtcaccgccgatggctgcgagatcttcacgctgtcgcccggcggactggaccgcccgggcctgccacccctcacaaaatgagccgctgatggcaaaaggaccggtttcccattccgaagacctggagctgcctttcgcggcggatgaggacgatggcatggacgagcggtcctatttcgccgagcaggccggcaagcccgcagcactccggccctcgcctgccaaggaagagcactatcacggccatcgcgaaaggctgcgccagcgcttccgcgatcatggcgatacggcgcttgccgattacgagatgctggaactgatgctgttccggctgatcccgcgccgcgatacgaaaccgatcgccaaggcgctgctcgagcgcttcggatcgctcgccgccgtcttcggcgcgccaatcgcgctgcttcaggaggtgaagggcgtcggcgaggcggtggcgctcgatctgaagctgatctcggcgatcgcgcatcggacgctgaagagcgaactgcgcggcaagcaggtgctgtcgtcctggtcgtccgtgatcgaatattgccacgccgccatggcgcacgaaacgcgcgagcagttccggattctcttcctcgacaagcgcaacgcgctgatcgccgacgaagtgcaggggcacggcacggtcgatcatacgccggtgtatccgcgcgaagtggtgcgccgcgcgctggagctttcggccaccgcgatcattctggtgcacaaccacccgtccggcgacccgacaccgtcgcgcgccgatatcgacatgaccaagatgatcatcgataccgccaagccgcttgggatcacggtgcacgaccatatcatcgtcggcaaggatggccatgccagcctcaaggggctgcggctgatctgaaaacgtggggcgaattttcctcgctccgccaaagccggctattgtggacggacctgctctttctcatcgtcggcgaaggacttcatcggccgatgtatcccgccccaagtttgcctcgcccattcctaatattcggccgtaaatcaatctgcaacattgaccggatacctgtgaacgcgccattttgcgtcgcaaaatgattccagctttccaatcgggaccaggctcaatgtttcaatacgatctcgttgttgtggggagcggcccggccggtcgccgcggtgctattcaggccgccaagctcggcaagaaggtgctcgtcattgaacagggcaagcgcgtcggcggcgtctccgtgcacaccggcaccatcccgtcgaagacgttgcgcgagacggcgctcaatctctccggctggcgcgagcgcggtttctacggcaaggcctaccgggtcaagcaggagatcagcgccgaggatctgcgccgacgcctgctgatcacgctcgaccacgaagtcgaggtgctcgagcaccagttcgcccgcaaccgcgtgcagcacctgcgcggcaaggcgagcttcgtggatgcctcgacgcttgaaatcgtcaaggacgacggcgaagtgatgcgcgtctctgcgggcagcatcctgcttgccgtgggcaccaagccgttccggcccgactatatccccttcgacaacaagacggttctcgacagcgacgagctgctcgatatcgaggaactgccgcgctccatggtcgtcatcggcgccggcgtcatcggcatcgaatatgccacgatcttcagcgcgctcgacaccgccgtcacgctgatcgatccgaagtcgaccatgctcgacttcatcgacaaggaaatcgtcgaggacttcacctaccagcttcgcgaccgcaacatgaagatcatgctcggcaccaaggcggaaaaggtcacgaagctcgatgacggcaaggtcgagctcattctcgacaatggtcgccgactggtgacggacatggttctgttcgcggccggtcgcatgggcgccaccgatgcgctgaacctgaaggcggcgggcctggaggccgacagccgtggccggctgaaggtcaatcccgagacgttcgagacatccgtgcccggcatttacgcggcgggtgacgtcgtcggtttcccgagcctggcttccacctcgatggaacagggccgtatcgcggcgcgcgtcgccgttggcgcggtcgccaaggagccgccgaaatacttcccctacggcatctacgccgtgccggaaatctccacctgcggcctgacggaagaagagatgaaggaacgcggcattccctatgaatgcggcatcgcgcgtttccgcgagacctcgcgcggccatatcatgggcctcgataccggcctcctgaagctgatcttctcgctcaagacgcgccgccttctcggcgtccacatcgtcggcgaaggtgcgaccgagctggtgcatatcggccaggccgtattgaacctcaagggaacggtcgagtatttcgtcgagaacacgttcaactatccgactctcgccgaagcctacaagatcgcaggcctcgatgcctggaaccggatgggtgacatcaagtcggagctctgagcttttcgctcgcgggccatgcgctgtcgccgtggtccgcaagcgccgccagggacatcgggctgggttcgcgggctccccgaaggcattgcggcgcctgacaagctcgtaataggcgcagcttgtataatcggctgcgtctgatagcgttcacgccacttggggggctctctaatcagcgagtgaccgtgcgcgaacaatccgagacgactgaccggaatttccagctcatcctcatcaagccgtcgcactatgacgacgacggctatgtcatccgctggtggcgggcgatgatcccatccaactcgcttgcggcgctctatggaattgccgccgattgcgccgagcgccgggtgctcgggccgggtgtcggcatcgagatcaccgtcatcgacgagaccaatacccgggtgaacacctcagcattgctgcggcagctgaaaacaaacgacaatttcggcatggtcgcgctggtcggcgtgcaatcgaaccagtatccgcgcgcgctcgatatcgcccggcctttccgcgaagccggcattcccgtctcgatgggcggctttcatgtctccggctgtctgtcgatgctcgacggccacgccgtggggctcgacgaatgccgcgagatgggcatctcgatgttcgcgggcgaagtcgaggggcggctcgacaaggtgctgcaggacgcggcatcgggaacgctggcgccgctctacaatttcatgaacgacctgccgagcatcgaaggtgccgccgttccgttcctgccgaagaccaatgtcgcgcagacgcttggactgagcaccagcttcgacgccgggcgcggctgtccctaccagtgctccttctgcaccatcatcaacgtgcagggccgcaagtcgcgcttccgtaccgccgacgatgtcgagaagctggtgcggatgaactgggcgcagggcatccacaagttcttcatcaccgacgacaactttgcccgcaacagggattgggaagcgatattcgaccggctgatcgagctgcgtgaaaaggatggcattccgctcggcctgatgatccaggtcgacacgctctgccacaagatccccaacttcatcgagaaatcgaagcgcgccggcgtcacccgcgtgttcatcgggctggagaacgtcaaccccgacaatctgacggcggccaagaaaaaccagaacaagatcaccgaatatcgcaagatgctgctcgcctggaaggcgcagggcatcatgacgttggccggctatatcctcggctttccggccgatacaccagataccatccgccgcgatatcgcgatcatccagcacgagttgccgctcgacgtgatcgagttcttcgtgctcaccccactgcccggctctgaagatcaccagacgctgttccgcaagggcgtggcgatggatccggatctcaacatctacgacgtcgagcacgtctgcaccgaacatccgaagatgagcaagcaggagtgggagagcatctatcaggaagcctggtcgctctactattcgcctgagcatatgaagacgctgctgcgccgggcggtggcgacaggggtaccgctggcgcggctggtcaaggtgctggtgtcgttcgcgaccaccgtgccgctggaaaacgtgcatccgctgcagagcgggctgttgcggttgaagcatccctcggagcgccggccggatttgccgcgcgagagcgccatggtcttctggccgcgcttcgtcggcgagacgatcgccaagcacctgaagctcggcggcacgatcgcgcggctggcggtcaccgccttcatgatttcacgcgacaagggcgccaggacctatatggaccaggcattgacaccggttggtgaccacgaggacgagacgctggaactcttcaccaagacggcgggcggacaggcggcggtctcgcatatcaagaaggtcaacgagctcacgcatgcccacagggcgggctgatcgcggcccttccgacagcgcaagcaccctcacccgcgcaaagcttgcccccgaaacaccgcccaaaatgaaaaaccccgcacgaggcggggttcatcaaaatccagattggccggagattactcggcgccttcctcggaagccttcttcttcggagcggccttcttcttcggtgcggcttcttcgccttcagcggcttcagccttggcagcagccttcttcttcggagcggccttcttggcgtccttctcggagccttcgccttcttcgtcggcgagcagctcttccttggtgaccttcttgtcggtgacgtcgagttcggtcagcagatggtcgatgaccttctcttcgaagatcggcgcgcggatcgaagcggccgcacccggctggctgcggaagaattcgaggatctgcttttcctggcccggatactgacgcagctgctcgtagatggcgcgctgcatttcgtcttcgctgacttcgacgccggccttttcgccgatttcggagagaacgaggccgaggcggacgcggcgctcagcgagcttcttgtactcttcgcgagcctgctcttccgtcgtgtcttcgtcttcgaaggtcttgccggactgtgcgaggtcgttggcgacctggttccagatgccgttgtactcggcttcgacgagcgaggccggggtctcgaacttgtacatttcgtcgagctggtcgaggatctgacgcttgaccttctggcgggtcatcgagccgtactgcgattcgatctggccgcgaacgatttccttcaggcggtcagccgattccaggccgagcttcttggccagttcgtcgttgatttcgacgtcggcgggagcggcaacgtccttgactgtgacgtcgaaggtggcttcagcgccagcgaggttcttggccgggtagtcagccgggaaggtgaccgtgatggtcttttcgtcgccagccttggtgccgacgagctgctcttcgaagcccgggatgaaacggccggagccgagaacgagttcggcgccctggtcggtgccgccgtcgaaggcaacgccgtcgaccttgccgacgtagtccatggtgatgcggtcgccgtcggcggccttgcccttcttggtctcgtaggaacgggcgctttcggcaaccttgagaacctgctcgttgacttcctcgtcggagatatcaacgacttcgcgggtgatcttgacgcccttgacggacttcagctcgatcgggggcagaacttcgtaggagagcgtgaactcgaaatccttctgagcagacaggatcagttcggcttcgtccttgtcttccgtcatcgcgatttcaggctgcgtggcggacttttcgccgcgctcggccagaatcgaggtcggctgttcgcggacgatctcgttgacgaggtcggccatgatggacttgccgtaaaccttcttgaggtgagcggccggaaccttgcccggacggaagccgttgatccggaccttgtccttcacgtcggcaagacgctcgttcatcttggtttccatgtccttggccgggattacgaccttgatttcgcgcttcagcccttcagcgagcgtttcgataacctgcatgtgttcctaccttcaattcgtggcggccgtgcccagacgccgttcgtttcgatgagcacgacgccggaaagtgccgggcgtggcctgttctcaattcttcttcgttctgcgtgagcggaacggcgcttggctccgggcaatcgaggggcacctatccggtccctcgcctgcaagccagctttggtgcgggtagagagacttgaactcccacgccttgcggcaccagaacctaaatctggcgtgtctaccaatttcaccatacccgcgttctcaaaaaccgcatgcatatgcctgcacatgaggccttccggagtgcggcgtctctataacacccgatttggaggaggcaaaggaaaaatgaaggccaaatgacagcgattttagcccctgccgcgcggacttcagccgtcggcgggtcaaactcagtaaagcggctcctcataggccggcttgccgtccaccaggaggcttttgatctgcgccacgccattggcgccaatgcttgctgtgatcgacacctgaccgtcccggcgcgcctcttcgagcgcaagtccggccccctcgggaacataatagcgctcgatgccatattcgacgcggatggtatcggcctgcgaggtctcgccataactgtagaagggctggctttgcagcacgacggaaccgtcggcttgcgggagcttatcgaaggatgattcggcgacctgccagaaaccgccctctcccggcttcagccgcacccagaggctgcgctgcgccgcctccttcggcatgccgcctgatatcgaggagacgggcacggaggatatgtcgtagttcagcaccacgtaatcgccgcgcaggaagtcgcgcggatcgaccggcgcggtcttcaggagcacctgcgttccattgcgcaacagcgaggcgcggctctgaacgatatagccgagcaccgccgtctgcagcagcgccaccgtgacggctgccgtgacgcagcggcgtttcgaatagcccttgaaggagaataagctcattggaccgccccccgcgccttgccggcaaatcgtctttcgagacggatgacgatccacgccaccgccgcgacgaacaggcccgcgcagaggaagagccccgacgtgccgagaatggagccgacggtgaccgatccgagatagagaatttcgacggcgaagaccgtgtaggccagatagcggacggcgccgttgtcacgcccctgcagggcgatcgccagaacggatgcggccagcgtgacgatcccaagcaaaagaacccatttgctggcgtcgagctcgacatgcagcaggagcaggccgatgacggcaagcaggaaggaataaaaggcgggcgctgcgccggctccctcgatcagcgaggacagcctcgccaccggcaggctgaccagaacgaagacggccatgccgccaacgacgtagatgagtgccagccacaggccggagttcagcgtgtagagccaggcgagccagcccagcagcaggagataggcaagatggcgaacgcggccggcgccggtatagcggaccaatgctatgacaatcgccgccatgacgggagccgcccatgaatcgatcgtcatcacgcgcatgtcggagttgccgagatagatcgcgaagctgccccatgacaggaagcccgccacgcccgacaccgcccccgagcggaacagcatggccgaaaccaccgccatggcgaaccacacatacatgaccgtctgctcgtcgcccgagagatgatacatctgcccgaccagcgaaatggcgccgccgaaggagagcgtgccgatcaccagcagggcgttggcggcagcgatctggccgcgcacaagcgcggcgccggcgccgagatggaccgaccagatcaaggcgaggatgaagaacatcctgacgagacgcggtatcgcctcccagttcgaggcgaccaccagaaggatggcggcggcgagcaggatggcggcgagtatcatcagcacgttgccgaggctgaagcttgccgggcgccgatcatagtcctgcagcagcgcgtccgcggtctgctcggtgatcaaccccttgccgacccatagcgacaaatccctctccagacgtccgcgatacatgccctaccccgcaaaccgcgcgccctctggcgcacctgattttcaaccttatagacgtggtttggcgtttgaggaaacggctccctggcgatttccttcacggatcatgccgcggctgcattaatcgcccggcaagactttgccgctatcatccgagatgccatgcatattgcgcatggagacgaccgatttactgcatcgcactatatcactcaaaatcattgagcatgagtgcaacccgggatgtacccggaccggattaccggacgctttcggatatgatttccgcctaaatgatcgggatgtggacctatcctcccaaaaacagcccgatcgaccgacaacgtcctcctcccagttgccggtcagacgaatggacgcccgccggataacgcatccggcgggcgtcttcgttccgtccggcaagtccaggcggcccaatgcccggctatcgttcattttgcctattcattgaccagaacatggcggaatcgtgcgatttacagcttgagaaatgcagccggcgcatatgtgcgttgaattcttgtctctgttagctcttcgcggtgcaatatatatacagctcatcagacagaggtcagcgccgataggcggcagctggcagacgcaagccctcggaaaggggaccgacatgaacatttctcgctctttcaacaactggcgcaagtatcgtcagaccgtgaccgaactcggccgcatgaccaaccgcgaattgcacgacctcggcatcgaccgcgccgacatccagcgcgtcgctcgcgaagccgttcgttaatatcctcgctgatctcagggcgattcgcttcctcccaggccgatcgcctcaccaagacgcccgctgccatcaggcaacgggcgttttcttttgtctcggtgtctcgttaacgccagagttgcgccaaagccgcgcgtttttcctgctcaaaaagtaacgcttgcgttttatctgtgcatagccgtgcacaattgcatggcaggcgcctaataattgcactgcacaatatgacagggatcacctatatcaaggtcaacaacagagacggcaatcgcgccgctcactgaactgattttgaggaactacaccatgaacccgatccgcatcgcaaagagctggctcagctaccgccgtaccgtcagcgaactcggcagcctctccaaccaggctctcgcagacatcggcgtaagccgttaccagatccacaacatcgcttcgcgcgccttccgctaatagcggaacgcaggaagtccccaaaacggcgccttcacggcgccgttttcgcgtttgggttacgttcgccgcctacatctccagcgcccgcagtttctccaccgcgaaatccacgaaagcccgcgtcttggccgagacgtgccttgcctcggcatggaccacatggatcgggagcggcgcttcctcgtgatcttcaagcgtcaggcgcaaccgacccgaggcaatgtgccggctgacctgataggatagcggccgcgacagtccccagccggtgacggaggctgcgatggcggcgtcgaccgtgttgcaatagaggcgcggatgcagcgtggcggcggcgccatcgggggcgaaatgccagtcgatcgacgcagacgaaccggtggcgacgatcgtggcatggttggcaagatcggcaggtgtccgcggttcgccgtgacgctcgaaataggagggcgcgccacagacgacgcggcgcacatttcccaccttgatcgccgtctggtcggaatcctgcaggcggccgatgcggatcgcgacatcgatcccctcctccaccagactgacgatccggtcgaacaacagcacgcggccggtcaggcctttatggatgtcgagaaactccgtcatcagcggcatgatatgcaactgcccgaactgcacgggcgcggtgatcgtcagcgtgcccgagggcgtcgcgtgcgagccgccggccgaggcctcggcttcgtcgatctcagccaggatacgcttgcagtcatcggcataacgccggccggcttcgctgagcttgaccgatctcgtcgaccgcacgaacagacgcgcgccggtggcgtcctccagaaaggccacggcgcgggtgacggcgggcgggctcatgtgcagctgccgcgccgcttccgcgaagcttgccgtctcggaaacccgcaccaagaccttcatgcattgaagccgatccatatcgtcgcctttattacgccggaagaaacagtctctttcctataatcgaaattccacacaataacaggaacaattattcttccgtcattatcaacggagaccagttccatgaagctctactcgttcccgctttccggccattcccatcgcgcccggctgttcatcgcacttaccggaatcgatgccgacatcgtcgatgtcgacctcgtcggcggcgagcacaagcagcccgcattccttgcactcaaccccttcggacaggtccccgttctcgacgacaacgggctgatcctggcggattcgaatgcgatcctggtctatctcgccaagacccgcgcgccggactggctgcctgatgatgccgccggcgcggccgcggtccagcgctggctttcggtggccgctggcgagatcgcctacggccccgccgccgctcggctggtgacggtgttcggcgcacccttcgacaccaaggaggtgatcgcgcgcgcccacagcattcttgcgctcatcgatgcggaactggccggcaagacatggatcgcggcggatcggccgaccatcgccgacgtcgcgctctacagctacatcgcccgctcgcccgaggggaacgtcgatcgcttcggctacggcaacgtgaccgcctggctgaagcgtgtcgaagcgctgccgcgctttcacccgttcgagaagacggcgatcggtattgccgacgcggcctgacacaggccaagcgccgccgccggtcctcaatatccacgaaggagaatgtcatgcttgtcttgaagcagaccgaaaagccttccccgtggcatgacggggagattgccctgcaggagagggccggcgtcgcggagcacatgaaggatttgggcgcgcgcattgtgcgcgaccatctgatcgaccagcaccgccagttctacccgcagcttcccttcatcgtactcggctccgtcgatgccgatggcaatccgtgggcgacgctgcgggcgaactatccgggtttcctgggtagccccgatccctatacactcagcgtcaagctcaagcgcgaacacgacgatccggccgaccgggggatggaggacggcgacccgatcggcatgctgggtatcgagctgcagacgcgccgtcgcaaccggctgaacggcaatatcacgcgcaacgcggcggatcgtttcgatgtcggcgtcgtgcagtcctatggcaactgcccgcaatacatccagctgcgggatttcggcttcagccgcgagccgggcttatcctcggccgtgccgccggtggtcgcggacgcgctggacgcgcgggcgatggcgctgatcgcgaagtcggatgcgttcttcgtcgcctcctattccgaacatggcgatggcgggcggcaggtggacgtttcgcacaggggcggcaagccgggtttcgtgcggatcggcgaagacggggttctgacgatcccggacttcgccggcaatctgttcttcaacacgctcggcaacattctgctcaatggccgcgcggggcttgtgttcgtcgatttcgacagcggcgacctgctgcaactgtccggtgacgccgaggtcattctggattcgccggagatcgcggcctttcagggtgccgaacggctctggcgcttccgcccccgtcgtgtcgtctaccgggccgatgcgctgccgctgcgctggcaatcgcgcgccgacgggcaatcgccgaacgcactgatgacgggcgactgggaagccgccgccgggcgcatccgtgccgccgagatggcgcagcgctggcggccgttgcgggtgggagcgatcgtcgatgagagtgcgggcatccgctcgttccacctggagcccgtcgatggcggcggactgatcgcgcacgatgccggccagtatctgccgatccgcgtggctgttgccggcgaggatcggccgctgatccggacctatacgctctccgtggctccttccgacaaccgttaccgcataagcgtgaagcgggagggtgtcgtctcgcgtcacctgcacgataacattggcgtcggcgatatcatcgaagcgcgtgcgcccggtggtacgttcggcatcgatgcgctggagcaacggccggcggtcatgctggcggccggtatcggcatcacgcccctgctcgccatgctgaggcatgtcgtctacgagggattgcgcaagcgccggatacggccggtttggcttttctacgccgcgcgcagcaaggccgagcgcgccttcgacgacgagattacagcacttgtcgctgcttccggcggggtggtcaggctggttcgcgtgctcggcgatatctcgggcgcggtcgaggggcaggactacgacgcgcaggggcggatcgacatggcgctcctgagtgccgcgctgccgttcaacgattacgacttctacctctgcggccctccgggcttcatgcagtcggtctatgacgggctgcgtggtcttaatgtctccgatggcaggatccatgcggaagctttcggcgtcgcgtcgctctcgcggtccggcggcgcgtcggtcgaggctccttcggcggaggttcaggcggcggccgatgtgccggtgcctgtctatttcatgcaatcggccaaggaagcccggtgggagcctgaggccggcaccttgctggagcttgccgaggcacgcgggctgcagccggaattcagctgccggctcggcaattgcggcagttgccggacaaaggtgctgtcgggcgcggtcgcctatacgaggcaaccgacggccgaagtggccaaggatgaagcactgatctgttgcgcggttccggcaaagggagagacgcggctggagctcgatctctagggaaacgtgagggccaccgttgggcggcagttgctgctcaaatatccggtttcctgccaatatccagtttgctgtcatggcgcggcgtgataatcagccgcccatgacccagacctcttctcattctcccatccacgtcgtcggcggcgggctcgcgggctccgaagccgcgtggcagatcgcaaacgccggcgttcccgtcatcctgcacgagatgcgcggcgtgcgcggcacagatgcgcacaagacggaccatctggccgagctcgtctgttccaactcgttccgctcggacgatgcgaccgccaatgccgtcggcgtcatccacgcggagatgcgcatggcgggatcgctgatcatggcttgcgccgacaagcaccaggtaccggccggcggcgcgctggcggtggatcgtgacgggttctcggaagccgtcacccgggcggtgcacgatcatccgctgataacggtcgtgcgcgaggagatcaccggtcttccgccgaaggagtgggacctggcgatcgtcgccaccggcccgctgacggcgccgtcgcttgccagcgccatccaggccgaaaccggcgccgatgcactcgccttcttcgacgccatcgcgccgatcgtctatcgcgagagcatcgacatggatatctgctggtatcagtcgcgctacgacaaggtcggccccggcggcaccggcaaggattacatcaactgcccgatggatgaggcgcagtacaatgccttcgtcgacgccctgatcgccggcgacacggttggtttcaaggagtgggaaggcacgccctatttcgacggctgcctgccgatcgagatcatggccgagcgcggccgcgagacgctgcgccatgggccgatgaagccgatgggtctgaccaacgcgcataacccgacggtgaaggcctatgccgtcgtgcagctgcgccaggacaatgcgctcggtacgctctacaacatggtcggcttccagacgaagctgaaatacggcgcgcagactgagatcctcaagatgatcccggggctgcagaacgccgaattcgcacgtctcggcggcctgcaccgcaacacctacatcaattcgccgacgctgcttgacggttcgctgacgctcaagtcgcgaccgggcctgcgcttcgcgggccagatcaccggctgcgagggctatgtcgagagcgccagcgtcggcttgctcgcgggccggttcgcggccgccgagcgcaagggcgaagcagtctcgctgccgccggcaacgaccgcgctcggttcgctgctcggccatatcaccggcgggcatctcagcaacgacgaggaaccgggcaagcgctccttccagccgatgaacatcaatttcgggctgttcccggaactcgagccgggctcgatcgtcaagccggagggcgtgaagcgcttccgcggcaaggacaagacgatcatgaagcggcagcttatcgccaagcgggcgctgagcgactgcgcgacgtggcttggcgatacggcctgatccgaatagggatcaggcggctctgcccataaaataagacaggtcagtgggtgaccggcccgttggccttcttccaggcatcgatgccgccctcgatgtggcaggcggatgcgatgccggcgtcgtgcgcggcctgtaccgccatggcggaacgttcaccgaaggcgcagtagaagaccagccgcttggtggtcgatacgccgaattcatgcagaacgccgccggcgccgatgctttcagcgagggccggatagggaaaatgcagcgatgtcgggatgacgccgtgacgctggcgttcgctgtcctcgcgcagatcgatcagcgcgacatcgggcctgcccatgagatcgaagacctgccggacgctcaacgaccatccgcgactgtcgacgtcgtgatgatccatgcctatcttcatgttggccggcacggccacgtccatcatcttcgggttggagagcttcaggttgttcatgagatcggcatattcgtcggccgagcgcacctgcaggcgcgggttgaaggccttctcctcgccgatcgtggagacagtgtcgcccttgtagtcgtgggcggggtagaccagcgtcgtgtcgggaagcttcagaaggcggccgaagatggattcgaactgggcgcgcggatcgccgttctggaaatccgtgcggccggtgccccggatcagcagcgtgtcgccggtgaagacgcggtcgggcagcacgaagctatagctatcgtccgtatggcccggcgtgtagatgacatcgagcgacaggccttcgatcgtcagcttgtcgttatcggacaggcgcatcgaaacgacatcagccttggtctgttcgcccatgacagtcgtgcagtgggtcttgtcgcgcaatgcgccaagacccgtgatgtgatcggcatgaagatgcgtgtccacggccttgaccagtttcaggtcaagctcgtggatgagctgcaggtaccgatcgaccttttccagcacgggatcgatgatcagcgcctccccgccgcgcctgctcgccatcaggtaggagtaggtgctggatgcggggtcgaaaagctgacggaagatcatctgcgtctcctgcgcgcggtctatattatcccttcggctgcggcacgatgcggatatagggcttcggcgccgcccatccgtctggatactgctttttcgcatcctcgtcggagaccgaaccggcgatgatgacgtcgccgccgttctgccagttggctggcgtcgcgaccttgtgctttgccgtgagctgcagggaatcgatcacgcggatgacttcgtcgaagttgcggcctgtcgtcatcgggtagacgaggatcagcttgatcttcttgtcgggcccgatcacgaagacgttacgaaccgtctgattgtcggccgcggtgcgcaccgtcggatcgccagacacagctgccggcagcatgtggtagagcttcgatacgttgaaatcgacgtcggcgatcatcgggtagttcggtcgcgtgccctgcgtttcctcgatgtcgtccatccagccgtcgtgacgctccagcggatcgaccgagaggccgatgatcttcacgccgcgccggtcgaattccggcttgattttcgccatatagcccagctccgtggtgcacacgggcgtgaaatccttgggatgcgagaacaggaccgcccaggaactaccaatccaatcgtgaaaattgatggttccttcggtggtctgcgcttcgaaatcaggggcaacatcgtttatcgcaagcatacctacctccaatgagttgtcgaaagtcataccgtttcgctgagcgcgcgaaagatgctccaatttggggcaccaggcaatatgacacgatagacgtaggtacgaccgggcgtcgccgcaagtctggcgggtggccggacacggtttcgattgaaagtcgaaaggtgtttttatcggtgattggcggctgtcggatcggtaagcggcagctcgcgatcgggctcggcgacgtagtttccaagcagccagagggctacttccgacgcctccttcggcgacgcgaattcgaaggtgccgttctggtgccgcgcatcgaggaactcgagcgtcagccccttgccggtgtcggaactctggacgcgcacccggccgggctggatgacctggcaggagtagtggcgctgcatgttgcgcatgaagccggtcttgttgtcgtgcaggcgaacgaacaccacctcgccgttcgcggtcgcctgcagcgagcggatcgcctcggtcggaaaggcgcggttgaactcgatgatggcgaagcccgcgtcatccagaccctgcgcctcgtgcttcgacgacatgcgcacggcgacaagggccaggagagcaagaagcgagaaaagaacgacccaggcgaaaatgctcacgttacactccatccaaaacaggccatccaaggcaggcgatcatgacagctataacgcgcgaggcttgcgcgagtttggacaagcgtcagattttcccgcgcatcagcgcgatcgtcatgccgatctggcggcgccattgcggttgctgcaccgttttctcgaacagccccgcccccacatgctgcgctttcgacagcaccggcccggccaaggccgcgggcagaaaggccggaaggagcggctgcgggatggcgatcttgcgtgccttggcgagatggtcccgcccaagcccggcaaaggcctcgatggcggccgaaacgcgcgtcttttccccgccgtcaaggaagctgtcgcgatcgaggccggtcgccgacaggatttcaagcgggatgtagatctgcccccggtggcgatggagcggcatcaaaagcagcaaacccgccatcgcctgggcgacgccggcatggccggccgcttcggccgacttcggcgcatcgtccggtgacaggatcaggctcgccagctggatcagcgccgaggccgtctcgccggcatagccttcgagcgcgccgcgcgattccatcggatcgtcgtaaagatcgaagacgcgggcgtctatcatgtcgagaagcgtttggcgcggcaggcagtgggtctcgatggccgacagaagtgccgcggccaccggattggcctcggtggaaccgtgggcggttccctgaagcaggtcgcgccagtattgcatgcggacttcacccggaagcggctcatgcacgaggtcgcggatacgggcgagttcggcgttgaaggcgtaaagtgccgccagcgcgccgcgcttgtcttgcggagacagcaggcaggcaagataacggtcgcgatcgctgtcgcgcagcatcgccaggcagatgtcctggttcgtcgaggattgatcggccattcgtcagaccgcgatcagcgccgccgcgacggcacgtgattccatcagcatgatgttgaaggtgcgcaccgccgccccggtgctcatcgaatccgaagaaataccggcagccttcagcgccgccttgaggtccgccgggatcgggcgcatgtcgacgccggtgccgagcagcaggaactcgatctcggacgcctcgtcgagcacgcgctgcaggttctcgatcgacagcggcatggtcgcgtccatcttccagccatggatgcccgacggcaggcagaggatcgaaccgcgatgcgacatgtcggcgaagcggaagccgccgttcccgtaggtatcgatcggagcgcgaccgggaaaatgcgcttcgcgtatttctatgcctcttgccatattctcacactgccggcttgccgggctgggcggccggttccggtactttcttgtcgttgtcgttgttgagcgcatccgggcgaagcttgaagacgatcagcaccggtgcagcaatgtagatggaggaaaacgtgccgatggcaacgccagccagcatgatgaaggcgaaggaacggatgacctcgccgccgaacagcgccagcgcgagcagcgccagcatggtggtggccgcggtcagcacggtgcgcgacagcgtctggttgatcgacgcgtcgatcaggatcggcagcggcatcttgcggtagcgcttcaggttttcgcgcatgcggtcgtagaccacgacggtatcgttgagcgaatagccgatgatggtcagaagggccgcgacgctcgtcaggttgaactcgatgcctgtcagcacgaaaagcccgaggatcaggatgatgtcgtgcagcgtggcgacgatggcgccgacggcgaactgccactcgaagcgcatccagatatagacgaggatgacgatgagcgacgcgagcacgccgagcgaggcggcgcgggtaagctcgcccgatatggcgggccccaccacttcgacgcggcggaaatcataatcggtgccgagttcgtcgcgcaccagcgtgaccgccgactgttcggcattctcgccgccgccctgcgcctccagctgcaccagtgcgcccgagggatccgcgagcctgcgggcctcgatgtctccgatcggcaaatcgccgaggcgggcgcggatatcgccgatgtcggccgcgccctgcttggccttgacctcgacgatcgaaccgccggcgaaatcgatgccgagatgcattccgaccgcggcgaagcccaccatggcggcgacgcaaagtgcggccgaggcggtgaacacgtagcggcggatgcccatgaagcggatgttggcgcgatcgaagatgccggtgtggacatccttcggcagatgcttcggatgccggcgatgcagccaggtgacgacgatccagcgggtgagcgtgacggccgtgaaaatggtggtcaggatgccggcggcaagcgtgacggcaaagccgcgcacggcgtcgttgccgaggaaatagaggatgacggcggcgatgacgatggtgacgttggcgtcgaggatcgtcatgatcgcccgagagaagccgtagtcgatcgcctcgaaaaacggcctgccggttttcgcctcgtcgcggatgcgctcgtagatcaggacattggcatcgaccgccatgccgatgatcaggacgatgccggcaatccccggcaaggtgagcgtagcgccgatgaggctcatcaccgcgaggatgaggacgaggttcaagagcagcgacagggccgcgatcagtccgaggccgcgatagaagccgaacatcaggccgatgacgagaatggccgcgacaatgccggcgacgagccctgcccgcgccgattccgcgccaagcgccgcgctgaccgtgcgctcctcgaccgcggtcagcgtggccggcagggcgccggcgcgcagcatgagcgccagatcgttggcgccctcttcggtgtagctgaccgggatcgcgcccttgccgtcaaggatcggcgcggtgatgggaagcgacgccatgacctgatcgtcaaagatgatcgcgaggtagccgccggtgttctgctgcgtcttctccgccagacgtttcgtgccttcggcgtcgagcacgtagctgatcgacaccgtatcggcctgcgtatcggccaccgactggacatcgacaatgttagcgccggtgatgaagtcggtgcgatcgacgaggtagggaaccggcggatcatccagcgaatagagaacctccgagctcgccggccagcgaccattgaccgcgtcctgtccggacatggttgcgtcgagcatgcgcacggagagcttggcgggttcgttgaggatattcttcagacgctcggcatcgacctcgccgaagacctgcacatccagccgatctgcgccctcgggcttgatcgcgaaatccgggttgccgaggccggaaatgcggcggctgacgatatcgatcgattgggtctgggccgccgaaatggcgccgtcgatggcggcattggcgatctggatcgtgagatcgccgctggcggcctgcgtgagcgtgacatcctgcgccgagccgccgagcaggccgttcccggtgccggcggccggttccttcagcgcggcgacggcggcgtcgatctgcttggggtcggtgatcttgaccgtcacggtctggtcgttgccggtgaggccggtgtagcggatattggcctgacgcaaccggcgactgatctcgcccaccgtcgccaccagcttctggcgcgcgacatcggcgcgatcgacctggaagacgaggtgcgtaccgcccctgagatcggagccgagcacgacgcggtgcttggacagccaggacgaaatcgagccggactgccccagcggcagaaaattgggggccgcgatcaccacggccaccagcaccacaaaccagatcagaacggtcttccagcgggaaaaatgaagcattttctctcgactatgtcagatccgggcgatccggttcgtggatatgcgtgatgactacgcggcgtcggcctttacgggctcgcccttcacgcggatttcggagacgccggtacgcacgatacggacgcggacgccatcggcaatctcgacttcgatttcccgctcgtcaatcaccttggtcaccttgccgacgaggccgccggaggtcacgacctggtcgccacgacggatcgccttcaatgcttcgtcgcgcttcttggcctgggcgcgctgcggacggatgagcaggaaataccagacgaccatcagcggcacgaacaggatgatcatttcgaagccggaaccgaacggcgacgccgcgctgtcggtggcctgggcgaatgccggggtgatgaacatgctaaactcctcaaacttttccggaggcggaacgtcgccttttttctcggtggccggactataattatggtctttgcgattgcaactgaaacagccgaaaaccgtaccgattccgctgcctcataacctttccgcatgtaaaaggccatgctacccggctacgaaaagcgattggcgcacagccgcgtgcgcgcgaaggaggaaacaccatggccgaagacgtcaacagcatcattctcggcgagcttcgccgccttgccgatgccgtcgaacggctcgcgggaccgccgcctgaaatcaacgactggaacgcggcggattgcttcgtctgggcccctgcgcgccagcatttgcagcctgtttcgcggccaaaccgcgtggcgctggcgctgatccgcggcgtcgatcgggtgcgtgacatcctgcatgaaaacacggtgcgcttcgccgaaggctatgccgccaacaacgtactcctgtggggcgcgcgcggcatgggcaagtcgtcgctggtgaaagccgttcacgaagatgttagacgcgaaaccggcgtctcgctgaaactcgtcgaggtgcaccgcgaggatatcgccagcctgccggtgctgctcgacctgctgaaggacacgccgcaccgggtcatcgtcttctgcgacgacctctccttcgaccatgacgacaccgcctacaagtcgctgaaggcggcgctcgacggcggcgtcgagggccggcccgacaatgtgctgttctacgcgacctcgaaccggcgacatctcctgccgcgccacatgatggagaacgaacagtcgacggcgatcaacccgtcggaggcggtggaggagaaggtctcgctgtcggaccgcttcgggctctggctcggcttccacaagtgcagccaggaagactatctgacgatggtcgacggctatgccgcgcacttcaagctgccgctggaccgcgaggtgctgcatgccgaagcgctggaatgggcaacgacgcgcggcgcccgctcgggccgcgtcgcctggcagtatatccaggacctcgccggccgaaagcggatcgcgctcgaccgctgctaagctcagcttgccgcttaccataacgacaaaagcccggcttcggccgggcttttgcgttgtcctcgatacgcaatatctattcgaggaaagtcgtgacctactcgaggaacgtcatcgggttcaccggcgtcgcgtccttgcggacctcgaagtgaacctgcggctgcttgacgttgttgccgctcatgcccgagacggcgaccgtctggccgcgctggatcttctggccgcgcgtcacgctcagcgtatcggcgttgccgtagacggtgacggtgccatcgtcgtggcggacgagaaccgtgttgccgagttccttgaggccattgccggcgtagatgaccacgccgttttcagccgccttgatcggggtgccctgcgggacagagatgtcgatgccgtcgttgcggctgccgttgacgttggcgccataggcggcgatgaccgcgcctcgggccggccagcgatacttgccgatgccggtggcctcgggtgcggcggacgccacttccttcttggcgacgtcgctgacgctttcggtcgcggcgggcgccttgtaggaggcaggctgggcggtggccgtttcaggggcaaccgccggctgggcggcgggcttgggttccgcctttggctggatcgacgcggtcttgatggtatcggtagcggcggcgctggcgttcggaatgttcaactcctggccgatgcggatcgagccggcggtcaggtcgttggccgccttgatgtcgtcgacgctgtttccggtcgccttggcgatcttggcaagagagtcgcccgacttgacgacgtaggtgccacccgcgcccttcgggccggcgccgacaggtgccttgccggactgatcggcgcccgccatcgacttgtcacgcgaggcgttcgagccggtcgggatgagcgcgaggttctgttcctggctcttggtcggctgcggcgcctgaccgcccttcgcgagatcacgcgactgggtggatgccttggcggcgttgccgccgttgaaggtcgggatcagaatgatctggccgggcttggcggccgctgcggtcttcaggccattggcacgcagcacttccttttcgggaacgccgtagcggttggcgagaatggcgatgctttcgcccggacgcatggtcacggaaggcgcattggtcgcggaccagcccgacgtcctcgggatcgacccggtgacgacggtgtcggtgtcgcgcttcggcggcgcgatcgtctgggtacgctgcggcgcgtcgctgcccgggaaaggctgcgcaagggcgacctgcttttcgcgtgccggcgacatcggcgcctgcgacaccgcgcctggcgcggcaagctcggaacgctgaaccgaaaccggagccgatgccatgcgtgcactcgacccataggccggctgctggctcggatacggctggttcatcgaattgttgttattcgcatagctcggctgcatcgcgccgccctgcatatccgcctgcggcaccggatcggcctggaggccgctcatgctgcgccggggaatggaattcgtcgttatctgatcctgaccggacgaagaaaacagaccgccgaaacgtgtcacatcggaactgcagcctgatgcagcactcgccaggagagccacgatcagggcattaccggcagacttcccgaacttaggcgaaacgctgaaacgcatgacactcgacccactgaataacgcaaccatttgtgggtatgattaaagcgcgttagcattaccaaccggttaaggcggagggattgacctgcgttttttgacaaatcgctaaccatagcgacagccgcgatcagagctgcgacgccacgcggggaacgatcggcaagtatggggagttgaataactcctcgcgctcgaagcggctgccggtcttggtcaggcgaacgagacggcactcggtctcggagatgatcagcggagcgatcatcgagccgccggagaccagctgatcggcatagaagcgcggcatgctttcgaaggcggcggtcaccagaatgcggtcgaaggtgccctcgccctgcaggccgccgctgccatcagcctggcgaacgatgacgttgcggatacccagtgcctcgaagcgcttctgggcgttggaggtcagcgtcttgtagcggtcaatggtaagcacgcgctcggccatgcgggcgatcacagccgtcatgaaaccactgcctgtccccacttccagcacccgctggccgggcttgaccctcaactggtgcaggacgcggacggcgaaatcgacgccctcgaggaaggagccgcattcgatcgggatcgtgcggctcgaataggcctgttcggcgaactgcggcggcacgaagagggagcgcggcgcctgctcgaccgccgtcagcaaatcaaggtctgacacgccttcggcccgcagcctcagaacgagcgccgcaaactcttccttctccaccagacgtgccgccaatgcgatttactccgtacccgaaagcgcccgcgtcacgcggtcctgtacggaataatcggtcagatccagtttcaaaggtgttaccgagatctttctattcttgagcgcgttgacgtcggtgccctcgacgaaagcgccggcgcgctcgccgaacttcaaccaatagtaggggaaaccgcgaccgtcggcacgagcatcgacctccagattgaaggcgagcttgccctgcgcggtcacttccgtgccctcgacctcttcaggcgcgcagttcgggaagttcagattgaggaaggtcccttcaggcagatcgaccgccatcagcttgcgcagcagcgccggggcatgggtctcgcagacctcccagggaaggacgcggtgatccccctcgcgaatgtaagcctggctcaacgcaaaggagcgtacgccctgcatcgtgccttcgatggcaccggcgatcgtgcccgaataggtgacgtcgtcggcgacgttcgaaccggcgttgacgccggacaaaacgagatcgggcttgatctccatcacctgcttgatgcccatgatgacgcaatcggtcggcgtgccgcgcagcgcatagtgcttgtcggagatcttgcgcaggcgcagcggctccgacaggctcagcgaatgggcgagaccgctctggtcggtctcgggcgcgacgatccagacgtcgtcggacagcgtgcgcgcaatccgctccagcgccgcaaggccttccgcgtgaatgccgtcgtcgttggtaagcagaatgcgcatggtctcaggccgcccgttcgatcttcgtcaggccgcccatgtagggcaccagcacgtcggggacggtcaccgagccatcctcgttcagatagttttccagaaccgcgatcaggcagcggccgacggcggtaccggagccgttcagcgtgtgaacgaagcggttggtcttgtcttccttgccgcgatagcgcgtgttcatgcgccgcgcctggaaatcgccgcagaccgagcaggacgagatttcgcggtaggtgttctgaccgggcagccagacctcgaggtcgtaggtcttgcgcgagccgaagcccatgtcgccggtgcagagcgtcagcgtgcggaaatgcaggccgaggcgcttcagcacttcctcggcgcaagccgtcatgcgctcatgctcggcgatcgagctttcggcgtcggtgatcgagaccagctcgcacttccagaactgatgctggcgcagcatgccgcgcgtgtcgcggccggccgagcctgcttccgaacggaaggacggcgtcagcgcggtgaagcgcagcggcagcttctcctgctcgaggatttcctcgcgcacgaggttggtgagcgtgacttccgccgtcgggatgagatagcgcccgtccgtcgtcttgaagaggtcttcctcgaacttcggcaggttgccggtgccgaacagcgcttcggggcgcaccagcagcggcgagctgacttcggtgtacccatgttcgctggtgtgcaggtcgatcatgaactggccgagcgcccgctccagcctcgccagcgggcccgtcaagacggtgaagcgcgagccggagagcttggcggcggtctcgaaactcatgtagccgagggcttcgccgatctcgaagtgttccttcggcgtgtggttccagcgcggcttttcgccggtcacgcgggtgacgacgttgtcggcctcgtccttgccgacggggacgtcgtcatgggggacgttggggatgcgcgagagggcgtcgttcagctcttcggaaaaggcgcggtcgtcttcctcggcggccggcagcaagaccttgaggtcggcgacctcggccttcagcttctcggccagctcggtgttcttctgcgccatggcagcaccgatctccttggaggcggcgttgcggcgggacagcatgtcctggaccttctgaacggccgtgcggcgcttttcgtccagcgcgatcaggctttcggacaggggctcggcaccacgcttggcaagtgccgcgtcgagggcttcgggattctcacggatccatttgatatcgagcatcgtcgttccaggtcgttgcaaaaaggatgacccggccgaagcctgaccgggcctcgaccggatattggaaagcgctcatcgaggaattgcggtgacgctagacgttgtccgtcttggcaacgtcctgggacccttcagcctcggtggccgcatcgcgagcacgctggcgttccacgagtcgcgccgcgtagatggcaatctcgtagagaatgatggtcggcagcgcaagaccgatctgggacatcggatcgggcggcgtcaggaccgcggcgacgacgaaggccatgacgatcgcgaacttgcgcttttcgcgcagccagtccgacgtcagcaggccgacgcgggcaagcagcgtggtgatgacgggaagctggaagaccagaccgaaggagaagaccagcgtcatgatgaggctgagatattccgagaccttcggcagcagcgagatggcgacatccccctcgcccggcgcctgctgcatggtcaggaagaaccacatgaccatcggcgtgaagaagaagtagacgagccccgcccccatcaaaaacaggatcggcgaggcgatcaggaacggcaggaaggccgagcgctcgttcttgtagagacccggggccacgaatttgtagatctgcgcggcgataatcgggaaggcgatgacgaggccgccgaacattgccaccttcacctgcgtgaagaagaattcctgcggcgccgtgtagatcaactgcgccttggagacatccaggttcgcccactggaccgcccatttgtaggggacgaccagagcattgaagagattcttggcgaaaatgaagcagacgatgaaagcggcgaagaaggcgccgatcgaccacatgagccgcgtgcgcagctccatcaggtgctcgatcaacggctgcggcttgtcttcgatatcaccgctcatgcttcatctttctttttcttcgccgccggcttcttcggcgcggctgtcgcggcggctaccggcttggcggcggccgtcttgctggcgggggcagccttggcaggtgctgcaggagcacttgccggagccggcgccgccttggcagcagcacgcttcggcttttcggccgtaaccgcgacggcggcaacggcatcggccttatcggcggccttggcgcgtggcttgcgggccggctttgccgtggcctcgggcacggccgccgaggcagccggcacgggagtgggcgcaggcatgacggatggcgttccggtcggtgcgacttctggcgccggcatcaggccgagcggcgcttccgtgttgctatcgaccgatgtcgagcgctggagatcggccttgatctcgttgcccatctggcgaagcgggttcatcgcctcgcgcagcgtgttgacaggattgagcttctgggcgtcgttcagcgtctggcgcacgtcgtccatatcggcttcgcgcagcgcctcgtcgaactgcgcacggaattcgccggcgactttgcgggcacgctgcgtcatcttgccgaaagcacgaagcatcggaggcagatccttgggacccaccacgacaatcaatacgaccgcgatgacaagcagctcggtccagccaatatcgaacattcaaggctcctgaacgggaaacgcgggggcggcgctgcccggacgtggttacttcgtttcgtcggccttgtgatcgacggtcttgcctgcggtggtcgtgttcgaggcctcggaggcatcctcgtcggtcatgcccttcttgaagctcttgatgcccttggcgacatcgcccatcagctccggaatcttgccgcgaccgaaaagcaacagcacgatgaccagaacgatcagccagtgccacatgctaaaagaacccattacgctaactcctgttgtgatgttctattgatgtaagaatacccgacatcaaatccaacatctaattccccgtagatagacgcttaatgtcacggtatcgaccatcgtgacaagatagtcctcggtcgaaaagtcgtgaagacaattgttttcgctcggcgtggcgaaacaaagacacggcgccgactattcctcgggcgcgccaccgggcgccagaaggcccagttcctcgagatccagctgcgtgatcggatcttcgtcctcggtcagctcatcgttcatcgatggcgacggaatattgaagttggccgggatgcgaccggagagcagccctgcccccttcaattcctcgagccccggcagatcgcgcagttcctcaagcccgaagtgatcgaggaagtcgcgggtggtgccgagcgtgacgggacgtcccggcgtgcggcggcggccgcgaaaacgcacccacccggcctccatcaacacatcgagcgtgccgcgcgaggtctgaacgcctcggatatcctcgatctcggcgcgcgtcaccggctggtgataggcgatgatcgcgagaacctcgagtgcggcgcgcgacagcttgcgcacctcgttttcgtcgcggcggatgacgaaggagaggtcggcggcggtgcgaaacgcccaggcatcgtcgaccctgaccagattgacgccgcgatgggcgtattcttcctgcagccgcagcatgatggcgcgcacgtcgaacaccttggggaggcgatcggcgatgaaggcttccgagacgggctgggcggaagcgaagacgagcgcctcggcgatgcgcgccgcttccagctcgtcgccgacgatgtcatcctcggcccggccgctgccgcgctcgtcgtcttccaggttggcgtcttccagatcggtcaagccggcagctcctgttcaacgacctgcatcgtgccatggtttggcccgcgccgcatgtagatcggctcgaacacgccgccctggcgtatctcgatcttgccttcgcgcgcgagttcaagcgacgcggcaaaggcgctggcgatcgccgtcacccggtcctcgggcgagaccatgtaggtcaatatatgctgttcgagcgccgtccagtcaccgacctcgccgatcaggcgggtgagcagttcacgagcctcggtgagcgaccagacggtgcggcgcgcgatcgtgacctgcgtgacagcctgacgctggcgcagcgacgcataggcggtcaggagatcgtagaggctggcgtcgtaggcggactggtggcgatctgggatatgttcgggagcgccacgggccagcacgtcgcggccgagacgattgcggttgacgagaccgcccgccgcctcgcgcatggcttcgaggcgcttcaggcgaaaggccagcgatgccgccatctcctcgccggaggggccgtcgtccttgatctgctgcggaatgagcaggcgcgacttcagataggcgagccatgccgccatcaccagatagtccgccgcgagctcgatgcgaatacggcgggcgctgtcgatgaacagcagatattgctcggcgagcgccagcaccgagatgcgggacagatcgaccttctgcgtgcgggcgagatgaagcaacaggtcgagcgggccttcgaagccggcgacgtcgatcaacagggccggatcggtagaggcacggtcggcgccgccatcctgccacagcttgtccatcggcgttgccgatgtctgcgggcgttcctgaacctttgtcgtcgtcacgtcgtctcgtccctttcgcggtcaggccgtcgcaagcatcgcatcgaattcggcgcggatcgcggcctcgtcggcaccatcggccgtcgggaacccctgctccacgcgcctggcgcgctcgagcgcagcacctttgagcagcggcacgttggcgacgacctcaagcatctcatccatatgaccgttgcaatgcagcacgatatcgcagccgcccgcaatgatattcgccgcccgttcgccaagcgtgccgctcagcgcgttcatcgaactatcatcggaaagcaacaggcctttgaagccgatatgctcgcggatgatcccgtcgatgaccttgcgcgaggtcgtggccggattatcggcgtcgatcgcggtgaaaacgagatggcaggtcatcgccatcaattcgtccttcatggcgatgaaaggcggaaaatcgtgggcctccagctcttcgcgcgagacgcggacgaccgggagctcgtgatgagaatcggcaaagccgcggccgtggccgggcatgtgcttcatgacggagagaacgccgcccgccttcaggccctcggaggcgacgatgcccatatcggtcacggtcttcgggtccatgccataggcacggttgccgatgacgttgctgctgccttcgacagggacatccagcacaggcaggcaatcgacgttgataccgaatttcgagagatcgaaggcatgcaggcgcgacatcagccaggccgcgcgcctgcccttttccggatccgcccgatagaggtcgccgagctgctggccggagggatagtgcggcaggatcggcgggcgaatgcgctggacgcgaccgccctcctgatcgatcagtaccggcgcgtgccagccgacgctttcgcgcatctcggccacgaggtctgttatctgctgcggctcggaaatattgcggccgaacaggatgaagccccaggggcgttcgcccgcgtagaaggccttttcttcgggcgtcagggaaaggccgctacagccaaggatcatcgcttttgattcggtcatacccgaatcatagagacgccatggcgaaatgcgagcagcgtcaactgccattcacaaaaaagaacggcacaaacgaaaagagcggcgggtatgccccgccgctctcaagcaatccagtttcgagacttacttcgaaatcaggcaggagccaccggccgcgcgatacttctcgcagatcgccgcggcttcgtccttggaaccggcggtgatacgcaggcggtagtaggtgcccttgcccgcgacctcggccttgcggatctcgtaaggcatgccgctcagtacgccgccgaacttcttcgacaggctggcataggacttctgcgcttcggcttcagacggcaaggatgcgatctggacaccgtagcttccaggagcagccgtcgtgggcggggcttgagccgccgccggcggaacggccgcgacttccttcggagcctgggccgcggcggttgccggggcaagagcagcagcgcccggacgcgatgccggcgcggtatcgctcttggtgctggtcacggcgcgaaccggcgggctgacgttgtcaggcgatgccgaggcggccttggcaagcacgttctcggaagcctgcttcgcggtcggcgtggtgccttcgaccggcgtcgagcgaatgtcggccgacgccagctgttcgattgtcggggcgtcggacgacgcggcgcctgccgtgatcttctgcgtctgcacggaggttggcttcggcagcgaaggtgtcgtgggctccggcgccggctcttcgcgggcgacgagggtaccatcgggccggacgatcatggtgcggaccttgcgcgccgagaccgacggcgaacgatcggcatccgccggatcggccgcggccgtgtcggtcgcgtcgttgttcggcagcagacgcggatcctgggtgtcgccgacgggcgtcgacatcgaaggcatcggcgcgtcgttgtcttcgggcagcgtttcgggcgtcagcgtgcgctgaacgacatcgaccggctgctcgtcgctggaaaccagcgatttctgcttcggcgcctcggcggctgcgccaccaacgctgtcatagacggccttgtcctggttcgggacggtcttgccacccgggttttcgggaacgaccttgaccgggtccttgtcggcgacgatgaccggcggctcgccggtggcgatgctgatgccgccgtcgcgcgccaggaaggagtagccggcgtaggcgacgccgccgaagatgacgatgacggccgccgccgccagcatgcgcttcatcgagcgggcgcggctcatatcctcggcgtcgcttgccgactggatctgaacctcggacaccgtatcacggcgctgctgcacgggctcgttgacgctgcggcggaagtcttcctcgagcgcgcgctcgaattcatcgaagctctgtgcctgcggctgcgatggctgcgggcgggcgacggacgcggccggagcaacggcggcctggccgcgcacgcgcatgtcctgggccggtctggcgggcgcatctaccggctttgcaggcgccagaagattggcgatctccgaatcgacgtcgaaatcgaaatccgacatcgccgggaccggctcgtgcttttcgaccggcgggagcgtcggaacatgcatctcgacggcttccgtctgatactccgcgtcggagatcatcgacggatcgaaaggcagttcttccgtcatgtcggcggcgggcgccggcgcccggtaggacgccgccgcgggagctgccggctcgggcgaacggtaggcgggcgccggctgataggcgggggcctgctgatagacgggggcctgataggccggcgcgggagcggatggctggtacggcgcgggcgccgggcgcgcggcttgctccggctggcggaccgccggctggtaggccacgggtgccggcgcaggctgcggcttcggctgcacgatctcctcggccacgacgggctcgacgaaatcgaggtcggccaattcgagctcgataccttcgagatccagctcgaagtcgtggccggcgaaggggtcttccgcatcgggcacggccttggcggcgaccatctgcggctcgggcacatggcgaggcgccacgggcgctgccgcaaccggagcgaccgcgacgggcggcgcggggatataggcacgcgcggcgactggcgacgagacgacaggggctggcgcgaccggagccggaacgaccggctgaaccgctaccggcgcggcttcacgcgcgacaaccgggtactgctggacatcggcgagaaggtcatcgatatcgaagttgatgtcgtcggcctcggcggcgacttccgtcagcgcggcatcggccttgacgtcgccgtccttggcggcggcggccagatcgaaggcgctgtgatcgaccacaggctcgacgaacgcttccacgacaggctgctcgacgacgagtgccggttcatggcgatcgatctctgccgggaagcttgcggcggccggcgcttcgaacgcggcttcgcggcgcggcgcggcgggtacgggagcggtgggcaccggctcggcggcgatcaccggtgccggggcggcaacgggtgctgcgacgaccggctcttcgcggcgagcgggatggaaattggcgatcggcaagcggatgcttgccgccgaccactgtggcgccttcgcaggctgcacaggcgtcggcgcggcgctgatggaaagctcgagctcctcgatcaggtcacgagcgccgccggagacgggctcgacgggcctcgacacggttgccgcccaatcggcggacgagagaaccgcgcgcgcatccggctgctcgaaaaccggcaggctgtcggcttcgacccgttgcgaaacaactggcgcttcgtactgaacaggttcggcctcatagcggggcgcttgctgcacgtattgcggctctggctcgtcgtaggtgacgggctcaggctcggcataaacaaccggctcaggctgagcgtaggccgtttcgaccggatgatcgacgacggccggcgcggtcggagcgtcgtaacgctcgaactcgcgcagcagttcgtcctcgagattgaaggccggctcctgccttggagccgcctcgacggtgttcgccgctacacggggctcaaaaccgacgatacgcgcaagctccgcaaggggatcgtcgtcagcaaagaggttcgcatcgttacgcgtgtcatacgcccgctgtttatctgccatactcatccactcgcaaatgcaaaggtttcgtgccagcgcattgtgggtaaatggtgacgctaccgcatctcttccggcgcagccgttcctgcgatggcaagacccgacttcaaaacggacgcaacggcgtacaccagccctagtctggtaatactagactctcggctcttatcgttaataaatcgtaagtctacctgatccttgcctttattccaatgcgcatggaaagaactggcgagatcgtagagatagaatacgacacgatgcggctcttgcgactgagccgccgcctcgaccagccgagggaactcggcaaccttcgcaaccaattgtaattccgcgggatccgctatcccagacaccgctttcgcaagggtttcgggagatacgtcgatatccggaaacgcctccttggcctgcctgaagaccgacatgcagcgggcatgcgcgtactgtacgtaaaagaccggattatctttcgactgctccgttactttggcgaaatcgaagtccaacggctcggaactcttccggtacagcatcatgaaccgcaccgaatcgcggccgacttcctcgaccacatcgcgcagcgtcacgaagtcgcccgaacgcttcgacatcttcaccggttcgccatcgcggaacagcttgacgagctggcacagcagaacggtaagcttggccttgccttccgacacgccgcgcgcgaccgcttccaggcgcttgacgtagccgccatggtcggcgccgagcacatagatcatctcgctgaagccgcgatcgaacttgttcttgaaataggccacgtcggcggcgaagtaggtgtaggagccgtcggacttgatcagcggacggtccatgtcgtcgccgacctcggtcgagcggaacagcgtctgttcgcggtcttcccaatcttccggcaactggcccttcggcggcggcagcgtgcccttgtagacgtggcccttgaaggtcaggtcgttgatggcggtgcggatggcggcggcaccattggcgtgcagcgtgcgctcggagaagaacacgtcgtgatggacgttcaaggcatcgagatcctcgcggatcatcgccatcatcgcatcgatcgtgcgatccttgaccagcggcatccactgatcctcgggcatgttgtgcagcttgacgccgtagtcacgcgccagtgactcgccgactggcaccaggtaatcgcccggatagagaccggacgggatctcgccgatcttttcgccgagcgcctcgcgatagcgcaggaacacggagcgcgccagcacgtcgatctgcgagccggcatcgttgatgtagtattccttggtgacgtcgaagccggcgaaggacaagaggttggccagcgcgtcgccgacgacggcgccacggcaatggccgacatgcatcggaccggtggggttggccgaaacgtattcgacgttgaccttgcggccctcacccatcgtcgagcgaccgtaatcggtgccgcttgagatcatcgatgcaagcaggcgctgccagtagccgacggcgatcctgatgttgatgaagccagggcccgcgaccgatacgtcggcgacgtcgggatcttccttcaatttcgcggtgatgatttcggccagcgcgcgcggatttgtgccgagcggcttggcaagcaccatcgccgcgttggtcgcgacatcgccatggctcgcatcgcgcggcggctctacggcgatgcgtccgaaatccagctcggatcgcttttccttgaccagatcgatctgttcaagggcggttttaatcctggcttcgaaatcggtaaaaaggttcatcgcactcttccatgcataggctgtgccacacggcatccacccggcctttgccgggcgaccgctgcctagcgcaaatccggagtctggtcaaacaagcgcctgtgggcactgatggcgtaggtgtcggtcatgccggcgagataatcgccaacatggcgcgccttcggcgcttcggccagccccgcgatgtgatccacccagtagtggctctgcatctccttcgggttggccatgtaggccgaaaacaggtcggtgacgatctgcgcggcgcctgagcggatgcgcatgatgtcgggatggcggtagatgcgcttgaagagcatcgccttgatctgcctgtccgtctcggccatgccctcagaaaacgtcgcgatcacgcggctggcgtgcctgacgtcgtcggcgctctcggggcggatctcggagaggcgctcttgggcgacggagatcacgtcctcgaccatgcgggtgatctggcggcgcatgatttcgtgggtgaagcggctcggctccagagtggggtagcgctccctcacctcggccatcaggccggccaggaacgggatatcctccagcatgtcgaaggtgagatagccagagcgcaggccgtcatcgatatcgtgggtgttgtaggcgatatcgtctgcgatcgcggccacctgcgcctccaggctggcgaaggtgtcgagctgcaggtcgtggatctcgcagtaatcgaggatcggctgcggcaccgggccgcgcgtgccggtcccgtccttggtgagcagcgggccgttgtgcttgaccagcccctccaggctttcccaggtcaggttgatgccgtcgaaatcggcatagcggcgttcgagcttggtgacgatgcgcagcgactgggcattgtggtcgaagccgccatagggcagcagcacctcgtgcagcgcgtcctcgccggtgtggccgaagggcgtgtggccgaaatcgtgcacgagcgcgacgccctccgccagatcctcgtcgagcttcagcgccctggcgagcgcgcgggcgatctgggccacctcgatcgtgtgcgtcagccgcgtgcgatagtgatcgccatcctgggcgatgaagacctgggtcttgtgcttgaggcgccggaaggctgtcgtgtggacgatacggtcgcggtcgcgctggaagtccgagcgcgtcgggctggagttctcgggatagagccgcccgcgcgtcgtccacgggtcagccgcgtagattgccctgtcgctgttaccgaagcctaatgcacgcctgtcgatcgtcattcttcaccgtcactcgccatgtccctggcgcacgcccattgacgccgccatacgctcttcatacctatagagagcataaacggcaaagagacgacgtatcgccgactttgccgcgggcggcgctttcatgatataaggcgcgatagcattgaaaaacagctgtttatattgatggctggaccactattctctccggatcttgaccccggcaggagcagacatgaccgaagcaagtgtaaccctttccgacgcggccgcgaagcgaatcgccaccatcgtcggcagcgatcccggcaagagcgcgctgcgcgtttccgtcgagggcggcggctgttcgggtttttcctacaagttcgacctgaccgacggcattcaggacgacgatgtcatcgtcgagaagaacgacgcgaaggtgctgatcgacagcatgtcgctgatctacatggcgggctcggagatcgatttcgtcgataacctgctcggccagtccttccagatcaggaacccgaacgcggtcgccagctgcggctgcggcaccagcttctcgatctgaccaccctctcctgctatccacaccgaaccggccgaagattgtcttccggccggtttaacgtcttgtggcttgctcatggtgcacgctagaagaagacgtcaaagcggaacgggaccaaagaatgaagatcgcgacctggaacatcaacggcgtcaaggcgcgtatcgacaacctcacgcagtggctgaaggattcgaaccccgacatcgcctgcctgcaggagatcaagacagtcgacgaaggctttccgcggctggagatcgaggctctcggctaccatgtggagacccatgggcagaaaggcttcaacggcgtcgccattctttccaagaccaagccggacgaagtgacgcgcggcctgccgggcgatccgctggacgagcaggcgcgttttctggaggcggtgttttcgcttcccggaaatcgtgttgcccgcgtctgctgcctctatctgccgaacggcaatcccgtcgagaccgagaaatacagctacaagctcgcctggatggagcggctgcgcgcattcgcggccgaacggctggcttacgaggagatcctgatccttgcgggcgactacaacgtcatccccgagccacatgattgcttcgatcccaaggtgtgggagaacgacgcgctgttcctgccgcagacgcgggaggcgttccgcaggctcgaaagcctggggctgacagacgcggtgcgcgccacgacggatgcggtgcccgcctatacgttctgggattatcaggccggcgcctggccgaagaacaacggcattcgcatcgatcacctgatgctgtcgccggaggccgccgaccggatgacctcgacggcgatcgaaaagcatgtgcgtgcgtgggaaaagccgtccgaccacgtgcctgtggtcgcctatttcgatttcgcggcctgattagaaggcgcggcgaccgagcccggtcctggcgatccggcggtcgatcgatcagtcggtgttgctgctggcgatcttgtgagagagcgcgatggcgttgcggcggtcgctttcactggccacggagaaggcctgctcctgcagcgattccatccatttgcagtccttcggcttgcagcggtcgagcgccgccgtcatcagcgccagaccgttggccgactggccttcctggaacaggatattgccgaacacggacatggcgccgggatgaccgctcttgcgggcctggttcagccacttcttggcctgctgcgaactggtgctgccgccatcgccggcaagcatcatctgcgccagctggaactgcgcttccggaacgccgaacgtcgaggcgacctggaaatagatctggcgtgcctgattgagatcgaccttcacggggctaccagggatgccgctcttgtaatagctggcgagcgacagcagcgcgttgacgaaaaagccggtatcctccgatccgggctcgacgccctgctgggcgatctcgctatagatcttgaaggcggcgaaatcgtcctgcgcgacgccgtcaccgtcggcatacatgttggcgagcgcccagcgcgagccggtgtggcccttttcggccgcgtatttgtaggcctcgaccgcctcttccttctggccgttcttgtaggccttgaaaccgaacttgaagagatcgaaaggaccggattccttgttgacgcccgacttgatgtcgaacgcgccggcgggagagctgagcgccgcgagacaggcgacggaaagccccataagcatcaatctgaaaggtctgaactcgaacgtcagcatttcactcgatttctttcgtttccacccatacgcgccgtaccggacatcctgtccataaggcccgcagataaacttccttcggcgagcgatcccgcggtgggttccaagacccgcttgcccgcgtcgcatccagccttttgccctcgcaagagagccttcatcaccttcgcatcgacctcatccgcccgcttcccggcgcgaactggcgacgatgccatcaacctcattccggcgagcccatagagcggcatttcgccttcagaaatgtcgtagtcaccaattgtgacaaaacgcgagacgtcgttacccaaagccggtcccgatagcggcaacaccgtcgaacgtgaggaaaatgaaaggcttgagaacgctgcggtcgaacgacgttttccggctgaaacaccttgcacagcaggcgaaacgatcaaagcggcggcaacttcgccgcacgtcatgcccgtctcttccgcattcactgaaaaacgacccatcttactcttttacgcgcaccctatgcctgtcattccctcgcccgacattaccgctgcgcctagtttgtggcgggaaatggacaattcgtattggagctcatcatacgcgaacactcaaaaaaaactgttgctgaatcgtcacaaattgacacgccagcagagcatgcttaatggcgcccggacaaagaaaagcccgacatttcgccgggctttcacttgcactgatcttggcgggtcagaacttgaccttgatgctggtggagatggccgccaccagatcgtttccgaaggaatatgtgacatcgtcgccgtaagtgacgccgtcgcgcgtgaaggttcccgattccccgctggtgagcacgccgagcgagcccgcaaggcgccattcgatattctctgtcgggctgtaggccgcgccgacgccaagcagccaactgtcggtctgtgcgccgtagccatcgctggtgccacgatcccacgtgacgctaaccgcgccgctccattgatcattgaacttgtgtccgatgccgccgctgacggtccagccgtcgcgatagccgagatcaagcgaggtcaggccgcccttcggacatggcaaaccatttgtcgggcagaaggggatggactgcagaacgctccagttcgtccacttgaccgagccgaaagccagccaatcgggtgcgataccgctttgaaccttcagctcgagagattcaggcgcttcggcggagccgaccacgggggtgttgcgacccaggaacgggttgccgcccgtgataggcaactgcgtcaggttcaccgtgccggtcagattgtcgtacttgacgcggctgttatagacgagacttgcgcgcaacgcatattccgggatctcgtaggccacgcccgcgcgccatccccagctctcgtccgagagatcaaggcgtccaacgccgctatacagcgcagaggccggcgcgggaatgacagcgacgagcttttcctggaagccctcgatttcctgatagaaggctccgccgatcacgcgcagctggccggggccgacatcgaatttataggagcaggtggcgccatagtttcggctatcaaccttcgtctcgacgttgttgttcgcgccggcccagtttacgcccgggttggtatgcgcgccgaaaggctcggaataatccaccaagcaatcgacattacccgcgccgcctttcagacccaaataggggacggcgtagtcggtcgtgtcatcggcatagttggggcgtgaattgagattgccaccacttgtgggaacgtcctgcacattcttcagcttgcgctgcggcatgacgtagatcacgccggactgaatagagaactgcgatgcatcgaacaactgatcgatattatagccgccacgatccagaccgcccgcgaaggcaggctgggcgagcgccgacaacataacaagcggcagggttactgccaaaaccttacgagatgccaaggtgtctcccccactgaggcaattgcgatggtgggactgtgacggcgagaggttaaaatggcaacttcgtgaccgggcgcgattgaaaagtgagctaatggatgctttacgtaaaaaattgacgggcacgtcaaaatttccccatattagaaaatacgtctcaaaaatcgctggaatcaatcaggtgatagagcaatcgttctatacgagcacaattatgttaccttctgacaacagttctatttttagaaaaaacttcgtggaaaagccgaaaaaaggcgtcccatcggccaagttatggcggagccgggcctcgttacggttaatttttcgaaaaaaggcgcctgattcaccatcagacgccttggaatgaaatactattaaaagttgattttactccgcctcggctacacgcgacagcgcgatcttgaggctcgcgagctgcaccgtcagttcctccaggcgctcccgttcggccgcgacgacctccgggttggcgttggcgacgaacttctcgttcgagagcttgccgttgatcctcgccatttcggcctcggtcttggcgatcgccttttcaaggcgggccttttcggcgccgagatcgatcagcgcgccgagcggcaggcagaccgtcgcctcaccggccacgatctgggctgctcccttgggcgcctgttcggcgagagaaatgccgtcgacacgcgccaggcgcttgatcgccgcgtcgtgacgcgacaggcggtcacgcgtcaggctgttggcgttgacgaagacgagtggcgcgaccgccgagggcggcacgttcatttcggagcgaaccgagcggatgttggagaccagatcgatcagccagttgatctcgtcggccgccgtatcgtcggcgtaggacggcgacggccattcggcgtggcagaccagaccatcgcgctcgcggccctcgcctgccgtatgcgcccaaagctcttcggtcatgaagggcatgaacggatgcagcagcttgtagatctcttcgagcacgtaggcgacgcaggactgcgcctccttcttggcgccctcgtcggtgccgccgaagatcggcttcaagagttcgagataccagtcgcagacctggttccagacgaagcgatagagcacgccggcggcatcgttgaagcggtaggcttcgatcgcctcggtgacgtcgcgctcggtgcgggccagttccgtcaagatccagcggttgaccgtgagctcggccgcctcgggaatgaaatgcggatcgttgacgacgccgttcatctcggcgaagcgcgtggcgttccagagcttggtgccgaaattacggtagccggcgatgcgggccggatcgagcttcacatcgcggccctgcgccgccatgatcgccagcgtgaaacgcagcgcgtcggcgccgtactcgtcgatcagttccagcggatcgatgacgttgcccttcgacttcgacatcttctggccgttcttgtcgcgaaccagcgcgtgaacgtagacggtgttgaacggttcgaccggaacgccatcctcgtccttcatgaagtgcagccccatcatcatcatgcgggcgacccagaagaagatgatgtcgaagccggtgaccagaacgttggtcggatagtagcgcgcaagttccggcgtctgctcaggccagccgagcgtcgagaacggccagagcgccgacgagaaccaggtgtcgagcacgtcttcgtcgcgtatcaggatctcgcccggcttaaaattctcgagcttttcctcgacccaggccttccacgggccttcatgggcgatgtagtgctggatggcggcctgcagggcctcctcttcggtcttttcgacgaagacctggccatcgggaccataccaggcggggatctggtgaccccaccagagctggcgcgagatgcaccagggttggatgttgtccatccactcataataggtcttgtcccagtttttcggaacgaagttggtgcggccctcgcgaaccgaggcgatcgccggctgcgccagcgtgtgggcatcgacgtaccactgctcggtgagacgcggctcgatcggaacgccgccacggtcgccatgcggaaccatgtgcttgtgcggctcgatctggtcgagcaggccggcctcttcgaagatctccacgattatcttgcgggcggtgaagcgatcctgaccctcgaggcgatcccaggcgccgtgaagggccgccggattgtcgagaccttcgaggaagtcctcgttctccttgatggtgatcgtgccatcgacattcatgatgttgatcgcgcgcaggccggcgcgcttgccgacgtcgaagtcgttgaaatcgtgggcaggcgtcagcttgacggcgccggtgcccgtggtcgggtcggcgtaggcgtcagcgacgatcgggatacggcggccgacgatcggcaggacgacatgcttgccgacgatgcccttgtagcgctcgtcatcgggattgacggcaacgccggtgtcgccaagcatcgtttccggacgcgtggtggcaacgaccagatagtcgcgcgtttcgaattccgtcggcttgccgtcttcgtcgaaggcgatcgggtgctggtaggcgacgcccttttccagcgggtagcgcaggtgccagaggttgcccttgacttcatgctgctcgacctcgaggtccgaaatcgcggtcaggagcttggggtcccagttgaccaggcgcttgtccttgtagatcaggccttccttgtagaggctgacgaagacttcgaggacggcctcggacaggccttcgtccatggtgaagcgctcgcgcgaccagtcacaggaggcgccgaggcgcttcagctggttgaagatcaggccgcccgactcgttcttccactcccagaccttgtcgatgaaggcttcgcggcccatgtcgcggcggcccggaagctgctgctccatcagcttgcgttcgacgaccatctgcgtggcgatgccggcatggtccatgcccggctgccacagcacgtccttgccgcgcatgcgctcgaagcggaccatgatgtcctgcagcgtattgttcagcgcgtggcccatgtgcagcgaacccgtcacgttcggcggcgggatcacgatggtgaagctgtcggcgcccggcttggcgttggcgcccgcgcggaaagcgtccgcctcgtcccatttcgcggcgatcttcggttcaacggctgcggaatcgtaggtcttttcgagcatttttggaccaaatctggaggttttctggatgcgggttgtaaataggatgcccgccagcaagtcaataaaaaagccgccccggagaccggagcggctctttgaaagggtcgcggaatccggtcagcggcgcgggccgcgcgccacgcgctcgatctcttcgcgcacgaggcgctcgaccagcgtcggcaggttgtcgtcgagccagtcgcgcagcatcgggcgcagcatgtcttcggcgatctcatccagcgagcgacgctcggcgccgtcaatggctgcagccagttcctcgaaggagcgggcgatctgcaggccggcatcctgcgacagcagcgactgctgggtctcctcgataaggctcggcagaaggcgatccgacagcggcgcggcaaccggctgtgccgcgatgggtgctgcggacatgggcggcgcgatggcgacctgttcctgaaccggcgcctgggcgggctgaacggcttcggcttccacgggctgcgactgtgacggcatttcgaacggcatcgcggcaggctcttcggccagcacgggctcaggttgcggcgccggagcgacctggtgcatcaccggctcttcaacggcctgctgctgcggctgagcgtccatcacgggcgccgatgcgacggggctcgatgccaaggcggttggcgcaacgggcgccggggccagctgctggcggaattcgagaggcggttcgcgcggcggctgcagggtgttgcgctcggaggcggcacgaacgcgagccgcgacatcggccagcgacatggcggcgcgcggtgcttcctgagcgggcgccgagcctgcggaattggcggcgacgaaacgcggatcggcctgctgcggcgcgggatcggggaattccacgccggcataggcctgatcgaccgtcagatgaatgtcggagccgtgatcgtcttcatcatcaccataaacaggcggcagcgatgcggagagtgccctgcccgcgcccggctcattgctttcgatgatctggcggatcgacgccaggatttcttccatggacggttcacgcgctacgcttggctgagccatatctatccccgttattcccgaacaacgatcggattgcgaggtgtcggcatccgaatcacccggactgtaggatagccgatcggggaaaaaaatcatcgcgaatcaaatgactgccgctttgcacagttttctgaaaggtcaacggttccttcgaaggccggcctgaaacggaaacgggcgccagtggcgcccgcatcatcgacaacccacgtcgcgtgtcgcttagaacacgaattcgcgtgccttggcgaagccaggcagcggcttgacggaggcgttgaagaagacgttttcggagaccgcgccgcgctcgctcacgaacaccgtcgcccgcgccgaaccgccatatcccttgatggcgacaaggcgaccgccttcgcgcagctgcgcgaagagcgccgcgggaacttcttccaccgcgccgttgacgaagatcagatcgtagggcgcgcccttggcgctgccggcttcgagcgatcccttgaccacggacacattggcgtaatcggcaaggtttgccgttgcctcggcggccagcgcctcgtcctcttcaagcgccacgacggagccggcgagcttggagaagagcgcggagacataaccggtgccgcagccgacatcgagaacgacgtcatccttggtcacggcggcgagttgcagcagcttggcgagcggcgacggctgcatgaggaaacgcgccggcttgcccgatgccgccggacagatctcgacgtcggcgtcgatgtaggagatcgccttggacttttccgggacgaaagcctcacgcggcacggcaaggaaagcgacctgcacggagtgcgaggtgacatccgtggtgcggatctggttgtcgaccatgttggcgcgtgccgtctcgaaattcatagtgtcctctcgcccattgaaaagcgcttctagctgatccgtgtcttaatcgcaggggaaccggctttcaaggcttactgagcgacggcggcaagaattcggatcgcgccgccggttgcatctcatgaccaggaacaatccgtggaaacattcatgagattgtgataatattgcaaccggaggaataggaggagaagatcatgtcagccatagctgaatatttgacgctattcgacctgctcatcgtcgccgtgttgatcgcgctcatgtgctgcggattgtggggaaaagagacaggctgagatttaaacataggttcccgcaaccaggacgttcaggtgctcgtcagctttattagcgatgacttcaacgcataggaaccaggccagcggggtatcatggcgaaatcagctcttttgggtggcctcttcatcgggggactattggcgatcgtcgtgatgataccgcttgtgcgcgcaagcgttcctggtgtggcgacctatggagtgtcaccgctggtctcgctgcagcgcgccaactgatcgatgcagagtgtggcccatagatggggtttggcgctgttcttcggacggttttcgacgggcaaagtcccatggtgaattttgacgcctgaaatccctcaggtttttgaacaacccccttgcgcttgttttctattcattctaaatgccgcccacgcttttaaatgtaagcgtcgtgaggcctcgtggcggagtggtgacgcagaggactgcaaatccttgtaccccggttcaattccgggcgaggcctccaaaatttcaccgaatacatgatgatatcagcatgtgcggcgctcgcagtggcgcggcctgtgctgcatgcatcaaaaaacctgaccgccgtctcgggcgatcaggttcatgtcattccgataccagccttggctcgatcaggggccaacacattgacggcgtgggccatagtttggctggtaggtattgtccgacgcgcgatacgagcgatatcggttgtagcaatagctgacatggtcgttgccgacatagcggggagcgcggggctgcgaggcgataattccgccgatcaaggcgcccgccgccagaccaccgataatggcgccagcgttgttgttatgacggcgatagtatctgtcgtcgtagcgattgtagtcgcgtcgataataatcacgaccacggtcgctatatctgtatccgcaccggtagtatgcgcaacgattgcccatatggctgttgcgtaccccggaatcgccaaacgttccgcggctttgaacggaacgcgagtcgccccagttctcggcgaatgcaggccctactccactgattgcggtggtcagcgccacgatcatgattgcaagctttctcatcgtacaccttcgaactgttaatgcgactcgcgtctcaaacgcttgaaggataaacgcattcgcgcgctcggtgttccgtcgatcgcagcagcgttcctgcgtcggggaaaaccgcaaaagaatcgccacgggtcgattgtgacacttttattgcaggttgcgctattttatgagcaacgcataaacagttcacatgggatggatggcatgctcagctggtttcgaaaacttctgccgcgcgaagatcgtttcttcgaccttttcgcccagcattcgcgcaccatcgtgggggcggccgaagcgctgaacgaattgctcaagggcaacgacaccgaacggcactgcgagcgcatcgtcacgctcgaggacgaggccgacaatatcacccgcgaggtgatgctcgccgtgcggcgcagcttcatcacgccgttcgaccgtgtcgacatcaaggatctcatccagtccatggatgacgcgatcgacatgatgcacaagacggtgaagacgatccggctgttcgagcagaaagagttcgatccgatcatgcaggaaatgggcgaagccatcgtcgaagcggcgggtctcgtcgccgaagccatccccctgctcgagcgcatcaacgccaatgcaacgcggctgagcgccatcgccgaggaagtcacccgcgttgaggagagatccgacgaactccacgaccgaggcctgaaagcgctcgtgcttcgtcaccgggaatcgaacccgatggcctatatcatcggcagcgagatctatggcgagctcgagaaggtcgtcgaccgcttcgaggacgttgccaacgagatcagcggcatcgtgatcgagaacgtctgatggacgccaccctcgcctttccgctgcttgccgggctgatcgcggtcgcgctgttcttcgacttcctgaacggcctgcacgacgccgccaactcgatcgccacgatcgtgtcgacgcgcgtgctgaggccgcagttcgccgttgcctgggccgccttcttcaatttcatcgcctttctgttcttcgggctgcatgtcgcagagacgctcgggacgggcatcatcgatcccggcatcgtctcgcccatggtgatcttcgcggcgctgatgggggcgatcatctggaacatcgtcacctgggtgttcggcatcccgtcgagttcctcgcacgctctggtcggcgggctggtcggcgcggggctcgccaaggtcggcttcagctcgatcgtctggagcggcctgctgaagacggcaggcgcgatcgtgatgtcgccgatgatcggcttcctgctggcgctgtttctcgttctggtcgtctcctgggtcttcgtgcggcagacacctttcgcggtcgaccgtaccttccgcgtcatgcagttcgtctcggcgtcgctctactccctcgggcatggcggcaacgacgcgcagaagaccatgggcatcatcgccatcctgctctattcgcagggctatctcggcggcagcttttacgtgccgttgtgggtggtgctttcctgccagtcggccatggcgctgggcacgctgttcggcggctggcgcatcgttcacacgatgggatcgaaaattacccggctgaacccgatgcagggattctgcgcggaaaccggcggcgcgctgacgctgttcggcgccacctggctcggcatcccggtctcgacgacgcatacgatcaccggcgcgatcatcggcgtcggcgcggcgcggcgtgtgtcggccgtgcgctggggccttgcgggcaacatcgtcgtcgcgtgggtggtgacgctgccggccgccgcgctgatcgcggccgccttctactggatcgccggcatcttcgcctgaagcgatgatatcaggaggcggaattccgcctcctctgccaccacaccgaaaagcgtcgtctcatgcgccgcgcgacatgcagatcgtgcgacagcaccagcacgccgagcggaatcatccagaagccgaggatcggaagaaagcccagacatccgcccaaaaccagaagtccgccgatcaaaagccgcgatatgcgcgacttcggcaacggaatgcgggtcgaccccatgacgatgtggccggtgacgtgatcgataccaaagcgtttggcgttgtttttcgggctctcggtcatcaccaccatgtggggataacctgaatgattgcaaggagatgtcatttttttgaaaaaaccgcttggcaaatcgagcaagcatttgtattagcccactcacaccgcggcgagcggtgatccctggtagctcagcggtagagcattcgactgttaatcgacaggtcgccggttcgaatccggcccggggagccagtttccaaaaggtctgcattgaaaaatgcaggcctttttcttttccgaaatcaagacgatacacctcacacccggcgccaacgccggcgcctcatcccagcggatggtcgagccgccgggacaaagtgcaagagggcgatatcagtagctgcaggaacgcccgtcgctgggcctgaagccatcggagcaggcacggttcatggaatcgccctgcacatagccggatgccgacccggacgaggtcggaacgctggtgcatcccgccgtgagcgccgaaaggccgatcagcgtgacggcggccaggatggttgaaattcgcttcatgtggacctctcctcaaaactgtcttggacattaagctagcacgcggccagcaaacgccacgtaaatttcttgctgcccgaacttcctgcttcacgccgggcgaccatgtacgcggccgggcaccctacccctgcagcgtgtcgaccttgcgaagatccggaaacaatcgggtccacatgagcaccacgacgatggttccgacgccgccgatgacgccggcggcgacggggcccatcatgcccgcgagcatgcccgattcaaattcgcccagctggttcgaggtgccgatgaagagtgaattgacggcgttcacgcggccacgcatcgaatccggtgtcagcagctgcacgagcgagctgcgcaccacgacgctgaccgtgtcggccgctcccaccacgaaaagcgccgcgatcgacagcgcgatgctggtcgacagggcaaacacgatcgtcgccacgccgaatacggccacggcaaccagcatcttcgccccgaccttgctggtgagtgagcgtcttgcgagcaagatcgacatggtgagcgcgccgacggccggcgccgcgcgcagcattccgagcccccagggcccggcttgcaggatatcgctggcgaagatgggcagcagcgcggtagcgccaccgagaagaacggcgaacaggtcgagcgagatcgtgccgagcatcacgggcttgctcttgatgaaggacacgccagcgaaaacggaagaaagcgtgaccggttcgcgcctgcttggcgtccatttcatgcggatcgagatgacgttgacgcttgcaacggcaaacaggacagcggcgacggcgaagggggcgacggcatcgacgccgtaaagcaggccacccagcgacgggccgacgatcagcgccgtctgcatcatcgaggtcgatgtcgccacagcgcgctgaagcagcgatggcggcatgatgctggggagaagtgctgccatcgtcgggcgctcgaaggcgacggttgcgcccatgatcgtcaccgccgtcaggatgcctgaaggcgtcagccagttctgccaggtggcgaccgcaagtgcggccgacacgattgccaggatcagctggcagacgaggccgatgcgccttcggtcgaagcggtcggcgacgtggccgaccacgaaggtcagcaccaccatcggcaggaactggcacagcccgaccatggccagcgcgaaggcgctacgggtctggtcatagatcatccagcccatggcgatagcgacgcactggaacgagagcgaggaaaagacgcgggacgccgcgaaattgagatagccgggatggcgcagaacgctatcctggtgaactgctgaaacattcatgggaagactgtccggcccgctgccgacagcgcgcctctgggggttgttgctgcaacggtttccgcccggacaggcgtccttgtcaatggcaacggggccgctttccgtacggccctgccggatcgtgaccaccgacagcgcttgccgcggtggtcaccggatcaggaacgctactttttcttcttcgtcgggcgaaccttcaccggtttcggcggcggtatcagctcggcgtcggcatagcagtatccggcgacccatccgccgctggcgaagagcttggaatcaccctccgcgtgccactggcaggtgagcgaattggggtcccacgccgtgacggccacgccatagatgcccttgcccgcgaaggtcgtcttcgggttgcccgtcaaccgccagccctccgccggctgcatcgtccatgagattctctcgccctcccgggccttctccttgagaccgaattccggggtctggcaacggttggtggcgggatcacaggtcatcctcaccgtagacatttgcgtcggcgtggttctcaccacggtctgacaactggtcagggtaagcgccacgagcgtcatggccaaggcaacattataccacatatccggcctcccatccgtcacatgctatcgatgagggctacattacaacattacgacaccggtcgcgcttcaccgttcgggggatatgtgcgcggacgattacatcgaacggcaatggcgatcagccaagcgaggtgtgcggggtgtgatcgggtgcgtatcgcctcggcgccttcgccttctcccggagattgtcgaacagggcgtagccgccggtccagcggccgaagccgctggcgatattgatgtggcccgccagaccgatgttcctgagatccgtcttccagagacgcgcgtaaagcgtcagacggtcgagttccatgtaatggtcgttcaggctgccgacggtgatgcttggaaatggcagcgcccttgtcggcatcggcccgaagcggatggccgcgtccgggtgccggcgttcggtggggcgcaggtcgcatggggcgacgagcagcgcacccttgatccggcgcgccgatggtcggtcggcgaacttcgcggcgagcaggcagccgagactgtgggcgacgatataggcctcgccgtgctcgatgagcgctgcttcgagccgctcggcccagcgatcgaccaacggatcgtcccaatcgtcctgctcgaccagaacgctctcggggcggtcgtggagccagaaacgctgccaatggccgtggtcggatccatatagcccggggatgatcaatgtcgcggtcatcgcgccctcctagaaatcggaatagcgcgggctgtgcatgagcgccgaaatctcgtccgtcatctgcatgatgcgctcgcgcagatcggcgcccgtgccgtcgtcgacatcctcgctgccgaagcaatatcgcgcttcatggagctcgagcctggcttccagctggtcgcggatagcgcaaaggcggtcgaaatgcctgatgatactcatcgtcgtctgctcctgtgcggccgcgtttttttccggccggcatctgatggagcagtattctctatatttttagtagattaaaggaacgagcatccctgcatgcgcgaacgaggggaaaattcgctatgctgataccgcctgagggcgacgatcgacccgcgagacgcgcgcccgccgatcctgtcggacaattcgcggatttcagtgttaaatctttatgcaggctgaaacttttgatccacactccccgtagcttcgtaacagagacaagagagaaacaggggaccacattcattgtccgacgacgccgcaaagccgcttatcctctggtttcgcaaggatcttcgcctcgacgacaatcatgcgctgcatgctgcctgccgcaccggacgcccgatcattcccctctatatccgcgagccctcctcttccggcaccggacctcttggcggcgcgcaggcgtggtggctgcatcactcgctggcgtcgctcaccgcatcgatcgaagcgcttggcggcacgctcaatcttgtgagcggcgatgcgctggatgtgctcggcgccgtgatcaagaagacgggtgcggacacggtcatgtggaaccgccgctacgatccgcccggcatcgccatcgatacgcgcatcaagcgggagcttgagcagttgggcctggatgcgcagagcttcgccggccaattgctgcatgagccgtcgcggctgaagacaggcggcgggacgccttaccgtgtgtatacgccgttctggcaagcgcttgagggcgtcggcgagccgcctcaccccgtcgatgcgcccaggaaggtcgaattcgcgccggagctcgccgcaagcgagaagctgacatcctggaagcttctgcccacgaaaccggactgggccaaggatttcgacgaagtctggactgccggcgaagaggcggcgcgcgagcgactttcggattttctcgatgaaagccttaagggctacaaggccgaccgcgactttcccgccaggcagtcgacctcgatgatgtcgccatatctggcgctcggcgtgatatcgcctgcccggatttgggaggagacgcgcgggctggatgtgccggcggacgatctggttcatttccgcaaggaactcgcctggcgcgaattctcctaccatctgctgtttcacttcccgaaactaccctacgccaattggaacgaccgtttcgacgggttcgaatggagcaacagcaagacgcattttcgtgcctggaccaagggtatgaccggctatccgatcgtcgacgccggcatgcgccagctctggaagcatggcttcatgcacaatcgggtgcggatgatcgtcgcctctttcctgatcaaggacctgatgatcgactggcgtcgcggcgaagcctggtttcgcgacacgctcgtcgatgccgacccggcgagcaatgccgccagctggcaatgggtggcgggatgcggcgccgatgccgcccctttcttccgcatcttcaatccggtgctgcagggcgagaagttcgatcgggatggcgcttatgtccgcgagttcgttccagagctcgcggcgctcgacaccaaatacatccacaagccgttcgcagcacctcagagcgtgctcgacaaggcggacatccggctcggcgagacctatcccaagccgatcgtcgaccacgcgaccgcccgcgaccgggcgttgaaagcctacaacgccgtaaaggacgccgcatgaacgcgcattttcaccatccgcacagtcgcctgaaaatcgcgatcatcggctccggcgtctccggggcatcggctgcatgggcgctcaatccgctgcatgacgtgacgctctacgagaaggaagcgcgcgccggcggccatacggccaccgtcgatgtcgattacgacggaatgcgcattcccgtcgataccggcttcatcgtctacaacgagccgaactacccgaacctgacggcgctgttcgcgcggctcggcgtcgccacccatgccagcgacatgagcttttcgctctcgctcgaccacggcaagctggagtggagcggcgccggcctgtcttcgatcttcgcgcagaagcgcaatctggtgcgcccgtccttcctgttgatgatccgcgagatcctgcgcttcaacaagacatgcctcgtcgaccgcgccgccggccatctggccgcacggtcgatcggtgattatctcgactggcgcggcttttcgccggggttcaccaacaactatctggtgccgatggcggcggcgatctggtccacgccggcggcgaagatgatgcagtttccggccgagcacttcgtcaatttcttcgacaatcaccggctgatctattccaggcagcaccagtggcgcacggtgaccggcggcagtcgaaactatctcgacagattgcttgagcctctgggtgaccggttgaagctcgggctcggcgtgcgcgcggtgcttcgaaccgagaatggcgtcacgatcatcgacgaagctggcgaacaacgccatttcgacaaggtgatccttgccgcgcacagcgatcagacgcgacgcatgcttgccgacgcgaccgatgaggaaaagcggctgctggcggcggtgccctatcagccgaacagggtcgtgctccatcgcgatccgacgctgatgccgcagcgccgcaaggtctgggcctcgtggaactatctgcgctccagctcggccgatggcaacgccgatgtcgccgtgacctactggatgaacaagctgcaggcgatcgacgagcggttcccgctgttcgttacgctcaaccccgatcgcgagccggacccgcgcaaggtcttcgccgagttcagctacgagcatccgcagttctgcgccgacagcgtgcaggcgcagcgcgcgctcgtgaacatacagggacgcaatggctgctacttcgccggcgcctggacgggctatggtttccacgaggatggactgacctcgggccttgcggccgccaaggcgctcggcgcgacgctgccgtggagcacgctcaagacaaacgacatcgaaccggagctggacgccgtcgcatgacgcaggaacgcgaaggacgtggcatgagcatgcgcgacaacgggccgccgcccgaggccgcggccgcgctctatgtcggcgacgtcatgcaccagcgaatgaagcccttcggccaccgctttcgctaccgcgtattctcgatggcgatcgatctcgatcggctggatgaggcggatcggctctccgtgctgttttcggtgaacgggcgcaatgccgtgtcgtttcacgagagcgaccatggcggcaggctgggcgcccgggcacatgccgacgagctgctggcgcgggcggggattgccgcccgccgcatcgtgctggtctgctatccccgcatcctcggctacgtcttcaacccgctctccgtctaccatgcctatgacgggcatgatgagctgatcgcgatgatctacgaggttcgcaacacgttcggagaacggcacacctatgtctgccctgtcggctcaggcgaagtcagcgagagcggtgttcggcagagctgcgagaagatctttcacgtctcgcccttcatcgagatgggcatgcgctacaatttccgcatgctgccgccgggcaaggagatccgctggcgtattctcgagaccgacgccgatggcccgctgctcgcggcgaccttctccggacaacagctggccatcacgacgagaaaccttgcgtggctgacggccgccatcccgttcctgccgatccggatcgtcggcggcattcattgggaagcgctgaaactgtggctgaagggcgcgaagtatatcgcaaagcccgcgccacccacgcccgtcagcgtggtcgcgccacgcgaaacggcggaggcagcggaataacataagcgcgcttcgatatatacgtcgttcgcgcgcaacacgggactggaaatttgtttggcttttccaatttttacgatagcgttcaaagcaatcgccggggggcggagtttttcagcgcatcgtcgtcctgaaccggccatatcttgccggaggagaaaaccatgagtgatgctagcgacttgaccgattctcaacgcaacgcgatccagctgacgcagcagaatatcggacaggtttcgaaggggttgcccctgcgcgcgaagctggcgctgagggcattgcttcgcatgcagcatggctcgctgacgatcgcgtttcccgacggtcgcgtggtgctggtgaccggcggcacgcccggtcagcacgcggaaatccacctgaagaactggaatatctgctaccgggcgctttccaacggcacgatcggcgtggccgagagctacatggatggcgattgggacagccccgatatcgcggccttcctcgagctgttcatcgtcaacgacgaggcgatccaggattacgccaacggcaagcgcggcctgccccgtctcgtcgagcgcgtccgccactggatgaatacaaatacccgcaaggggtcgaagcgaaacatctcggcgcattacgatctcggcaacgacttctacaagcaatggctcgatccgacgatgacctactcgtcggcgctttactccaccggcgccaacgacctgcagtcggcacagaacgccaagtatcgggctctcgccgaggcgaccgggatcaagccgggtgaccacgtgctggagatcggctgcggctggggcgggttcgccgaattcgcagccagcgaactgaactgccgggtcacgggcctgacgatcagccgcgagcagctggcattcgcggaggagcgcatccgcaaggcaggtctcggcgacaaggtcgattttcgctttcaggattatcgcgacgaaaccggcgtctacgacaagatcgtttcgatcgagatgttcgaggccgtgggcgagaaatactggcccgcctatttctccaagctcgagcaatgcctgaagcccggcggcaaggccggcctgcagatcataacgattcggcccgagtccttcgaacagtacaggagcaacccagacttcatccagaagtacgtttttcccggcggcatgctaccgacccgcgagcatttagcggaacttgggcgaaaagtgaatttgtcactggtacgagacttcggttttgggttagactacgcccgtactctggccgaatggcgggagcggttttggtccgtgtgggaacgagttcgcccactgggattcgacgagcgcttcaagcgtctctgggagttctatttattttattgtgaagcaggtttccgcgcccgaaacatagacgtccgccaggtcgtcttttcgcggagctgacgagagcggatggcgggaccagacagtcgacctcctgtcccggtcgccatccgcctcgtctattccctctcaccagcctgatcgtcacctgctcgcgtgcagtcaagcgtgcctttcacctcagcgtgtgacagccgcgactactccgcggggcttggggtcaccgggcggcgaccgtcggcgcgtgggcgctcctgccagccggtggcacgattgaccagccagaaatacaggctgtagggaagcaggttgagagccttcagcgtgtaggtgaagcgcttggggaaggtaatctcgaaacttttcgacttcaggcccgcatagatctcggcggctgcctcatcgaccgggataagcgacggcatcgggaattcgttcttgcgggtggcgggcgtgtcgacgaaaccaggattgatgagctggatgcggatgcccatcttgtcgagatcgaatttcaggctctcggccatgttgatcagcgcggccttggtggcgccataggccgcccccgtgggcaggccgccgtaaccggtgaccgaagagacgatggcgatctgcccctgccccttgtgcttcatgtggcgcaccgccgggacgaggcaattgaccacgccctgcagattgaccgcgaagctgcgctcgaaatcctcacggcgcaattcttccgcatgcacgggcagatagacgcctgcgttgaagacagcgagcgccagcgcgccgtgctcgtattcgatcgatgcgagcacatgctccatgtcctcgggattggtgacgtcgccatccagcacgatgatgctgcccgccaggccattcgcctccgattgcaattcggcgagcttttcgtgatcgcgggcggtcacggcgaccttgtagccttcgcttgccattttcagcgcgagggcacggccgatgccggagcttgcgcctgagatccaggcaattccatgttcggggcgggctacaaaatcgttcatggcgtgaatcctccggttgtatcgaaaaacgtcgaaacgggcccggaagttcctctcaacctcccgggataatggctctatcacgctattgtggctgctttcagccgatcaggtcgccaatcagctggcggaaggacccggtcagtttgatgggggcgtcaagaacggaaaatgcaatgcagggacgatctttttcggccaccggacggtgatcgatcgtctcatcggcaaccgagatgtcaccggggccgaaacggccgcgcgtgtcgttgaaggcgccgtcgatgatgagcgtcagctccatacccttgtgggtgtgggcgggcagcgctcggccgggcttgatccacatgacgctgacctcgcagccgtcgatatcgaccgaatactccttgaaaccgggaagcttggttttccacggcaccgtgtcgacatcgaagccgacgaggcggcgaagggcgcgcgggaaagtccccggctttgcactggcgatcggcggcgacttcggctcggtgggcgtggcggatgcgaagatgcgcgccaatctgacatcgcgatcgtccagccttgtttcggaggtctgctccagggcctcaccggccaggaactccaaatcccgtaccagcatccgacgatccggcttcatctccagatgcgattcgacgagcacccgcgccggctcgggaagggaaccggcaacatagtacgccatcaatgcatcgaccgtgtcgatatgctcgtgaaccatgatggtttcggtcgtttccgctttcagtgattgctttgtcatcgtccatacgatgaaagtcaatgttcagatcacagacggcccccaatcgcggcatcgcaggccgatcgggggggcggaagtctaattttaccgtggcagtctggggcgaggaataggatttcttgccaacccagccttgtgaagggaaaagaccgttcctaaactaagtgtttcaaagaggcagattccatgaccgtgcacccttccgtcctagaagccatcggcaacactcccctgatcaagctcaagggggcgtcggaagcgaccggttgcaccattctcggcaaggcggaatttctcaatccggggcaatcggtcaaggatcgcgcggcgctttacatcattcgtgacgcggagaagaagggcttgctgcggccgggcggcgtgatcgtcgagggcaccgccggcaacaccggcatcggcctgaccgtcgttgccaaggcactgggctaccgcaccgtgatcgtcattcccgagacgcagagccaggaaaagaaggacgcgctgaagctgctcggcgccgagctcgtcgaagtgccggccgtgccctacaagaaccccaacaattacgtgaaggtttccggacgactggccgaacagctggcgaagaccgagccgaacggcgccatctgggccaaccagttcgacaatgtcgccaaccggcaggcgcacatcgagacgacggccaaggaaatttgggcggatacgtcaggcaagatcgacggcttcatctgctccgtgggctcgggcgggacgctcgccggcacggcgatcgggctgaagggcttcaacaaggacgtcaagatcggcatcgccgacccggatggggcggcactctacgagttctacaagaacggcgagctgaagtcgtcgggcaactcgatcaccgagggcatcggccaggggcgcatcaccgccaatctggaagggttcacgcccgacttcgcctacaatatctcggatgcggaagccctgccctatgttttcgatctcgtcgagcatgaggggctttgcctcggcggctcgtcggccatcaatatcgcgggcgcggtgcggctcgccagggatctcggcccgggtcacacggtggtgaccattctctgcgactacggcaaccgctaccagtcgaagctcttcaatcccgatttcctgacatcgaagtcgctgccgctgccggcatggatgacctcgcccgtcgatatcaagatcccatacgaacccgcagcgtgaggcccgatgcccgttaatgccctctaccgtgacgacttctatctctcgacctgcgaggccgtcgtcaccgccatccacgaagacgggggcatcgagctcgatcagacctgcctttacgccacatcgggcggccagccgggtgataccggcttcctcgagcgcgcggatggcagccggatcacgctggggcagacaaagcacggcgcggccaaggacatcatcatccatgttccgcttgatgaggggcaggcaagccccgaggtcggcgagaagcttgtacttcatgtcgattgggagcgtcgccacaagctgatgcgcatgcacaccgcctgtcatctgctgtccgtcgtctgttcctatccgatcaccggcgcggccgtcggcgaggaggagagccgtgtcgacttcgacatgaccgatacgatcgacaaggacgaggtgacggccaagctgatggcgctggtcgatgaagaccaccccgtttacctgcaatggatcacggacgaggaactggcggccaatcccgggatcgtcaaatccaagaacgtacgcccgccgatcgggctcggtcgcgtcagcctcgtctgcatcggcgagaactcagcgattgacagccagccctgcggcggcacacatgtgtccaagacgcgggaagtaggacggattcacatcgccaagatcgagaagaagggcaaggagaaccgccgcttccgtatccgtttcggcgctcccggcgacgacgcgtaagcattgattggagagagcagcatgagcgaaaccacgagccgcttcgtcgtttcggccgattgggtcgaaaagcagctggggacttcaggtttcaaggtggtggacgcctcctggtatctgccggcgcacaagcgcgacgccaaggacgaatatgcggcgggccaccttcccggcgccgtgttcttcgatcaggacgcgatagccgaccacgcgaccggtctgccgcactcgctgccctcgccggagttcttcgccgccgaagtcggcaagctcggcatttcagagacggacacgatcgtcgtttatgacggcatgggcttcttctcggcgccgcgtgtctggtggatgctgcggaccatgggcgccaaggacgtttacgttctggatggcggccttgacggctggaaggccgagggacgtgcgctcgagactggaacagccactccgacgccggcggttttcaagccgaaattccgggccgacaaggtcatccccttcgagaccatgcgcgagatcgtcgatgacggttcggcgcagatcgccgatgcgcgcggcgccggccgcttcaccggcgaggaagccgagccgcgcgccggcatgcgttcgggccacatgcccggcgcccgcagcctgccggcaaccagcctctcggccaacggccgtttcaaggacgtggcaacgctgaagacgatgatatcagatgcgggaatcgacctctccaagcctgtcgtgacgagctgcggctcgggcgtgaccgccgccgtgatcatgctggcgctggaaagcgtggggcatgacgacaacgcgctatatgacggctcgtggagcgagtggggcagccggcaggacacgcccgtcgcgaccggtctcgcggaagcgatcaaagcttgaccatggcaaaagcaccctcttcgctgaaggcccatgtgacccgcctcgagatgacggcggcgccgaagacgagcctgccggtgccggtcaatatccagaccgccatcatgcgcgcgccggaaattccgctgccgttctaccgctatctctatcgccaggtcggcgcgcgatggcagtgggtggatcgcctgaggatgaacgacgaggaactggccgccacgctctacgacaagcgcaacacgatctgcgtgctctacgtgaacggggcgccggccgggttctacgagtatctgaccgtcgacgaggatacgatcgagctcagccatttcgggctgatggagcatgcgctgggtcttgggatcggcaagtggttcctgctgcaggcgctctacgcgatctggacgcagaaccctttgcgcgtgaccacgacgaccaacaatctcgaccatccccgggcgttgcagctctaccagatgttcggattttctccggtgtccacgggcaccgcgatcgtgcggccgctcagcgacaaggaactgcttgagctggcgaagagaagctagctggcgcgcgcaaggatcgggtggtttccactcgggttgaagcgcattcatggcaagctcaaaaggagacttgccatgaccgctttatctttcaccgcgatgccgaccgccgacgccgagacgatctggaacggcgggaacgatgcctatggtcactcgccggagacaatgatttccgatgggccgggacacccctgccgccattgcctgaaaaacatcgattcgggcgacgcgctttacgtcttcgcctaccgtcccttcccgcagctgcagccctacgcggagacgggacctgtgttcctgcaccaaaagcgctgtgagcgctatgaggccgaggaagtgctgccacctgtcctgacgacgagccccaacttcatcctgcgtggctatggtgccaacgaccgcatcgtctacggcaccggcgccgtgacggaggtcgccgatatccctgcctatgcgacggagctcctgcgcaggcccgaagtggcctatgtgcatgttcgctcggcgcgcaacaattgctatcagtgccggatcgacggttgaatcacggaaaaaagccggctgcggagagcgcaaccggcttcagttgacgcagcgcgatggaccttacgccacgttgagcacggcttccgcggcgtaaggctcgtagcccagcgcctcggcaacggctttattggtgacgcgccccttgtggacgttgagaccgtttctgagatgccggtcttccgcgatggcgcgcagaccgcgatcggcgagcgccaggccgtgaacgagcgtcgcattgttcaacgcctgcgccgaggtgaccgggaccgcgcccggcatgttggcgacgcaataatggacgacaccgtcgacctcgtaggtcggatcggagtgggtcgtcgcatgcgatgtctcgaagcagccgccctgatcgatggcgacatcgacgataacagagcccttcttcatgcccgagagcatttcgccggtgacgagcttgggcgcggcggcacccgggatcagcaccgcgccgatgacgagatcggcggagaagacttcatcctccagagcctgaatgctggaatagcgggtatggatgcggccgccgaaaagatcgtcgagctggcgcaggcgcggcagcgacttgtcgaggatggtgacatccgcgccaaggccggcggccatacgcgccgcgtgcagaccgaccacgccgccaccgataatggtgaccttggccggcagcacgccgggcacgccgcccaggagaatgccgaggccgccattggccttctgcagcgccgtagcacccgcctggatggaaagacgaccggcaacctcggacatcggtgccaaaagcggcaggccgccacggtcgtcggtgaccgtctcgtaggcgacgccggtcacgcccgacgacagcaggcccttggtctgctcggggtccggcgccagatgcagataggtgtagaggatctggccgtcgcgcagctgcgcccattcggacggctgcggctccttgaccttcacgatcatgtcgcacttttcgaagatgtccttggcggaagaagcgatcttcgcgcctgccgcggcataggcagcatcgtcggcgccgatgccggagcccgccttcgtctcgatccagacctcgtggccatgcgcgacgtattcgcgaacggcggctggcgtcaggccgacgcgatattcgtgattcttgatttccttcggacaaccgacgcgcatcggggcgctcctcctcgtttgtttttcaagcctcgtcccgcgaagcgttcacaagcgaaatccaatcaccccgcgcgcgaaatgtccttgcaaagaggatttgcatgaagggcatttttcgaagaaagatgcgtttcggacgcaataatcgaaagttcttcgaatgtcggaactagatgccatcgatcatgccattttgaaagcacttcaatcgaacgcacggatcaccaacgcggacctggccaccaaggtgggactgtcggcatcggcctgctcccggcggctcgacatactcgaccgcagcggtgtcatcctcggctatcacgcgcatgtctcgcccaaggcgctcgactacaagatgatcgccatcgtgcatatctcgctctcgggccagttcgccaagacgctttcggaattcgagaccgccgtgaaacgctgcccgaacgtgctcgtctgctacctgatgtctggggaatacgattatatcctgcgcgtcgcggcccgcgatctggaggactatgagcgcatccatcgcgactggctttcggccctgccccatgtcgtcaagatcaattcaagcttcgccttgcgcgaggtgatcgaccggcccaatgtgggcttgtagcggaagagcggaatcacccgcgcgcgggtttccggaatggggcgagagcccgtgcaataagaagacgccatgaaatcgaagacccggggctatattttcgttcttctggcgatcaccatcttttccattcaggacggcatctcgaaacatctgggcggggcctatccgcccgtcttcgtgacgatgatccgctattgggcattcggtctcttcaccgtccttctggccgcgaagatgcgcggcggcattgtcgccacggcgcgcaccaagcggccggtcttgcaggtgatccgcggattgctgctcgccgcccaggtggtcgtggtgatcagctgcttcgctgtcattggactggcgcgctcgcaggcgatcttctcggcgacaccgatcctgatcgcgcttctcgccatcccgctgctcggcgaacgtgtgggctggcggcggtggacggcgatcggcgcggggttgatcggcgtgcttctgatcctgaagcccgacagcggcttcttcgacgtcacgctgctgctggcggtgctatcctgcttcctcttttctttctacgtcatcgccacccgactggtcagccgcgacgattcgtcgatgacgagcttcttctataccggtgtcgtcggcgccatcgcgatgacgctcgtcgggccgttctactggacctggatggcgcccacggactggatctggatggcgctggtctgcatgaccagcatcgcgagccactacttcctgatccgagcctatgacatgctcgacgccgccgccgtgcagccgctcacctatctgcagctcgtctacgcctcgatcatcggcgtgacgatctacggagagacgctgagcctaaacacgatcatcggctccgtcatcgtcgtcgcctccggcattttcacgatctggcgcgagcatatcgtggcgcgccgggaagcaacgcggatgtaaaaaacgaccgtgcaattttagtgaattgtataaatcgatttcaatctacgcgacgtatgctgtctccagttcaatttgggagacgcgtcatgcacaatctcaacattattacccgcaaggccgagcgcaaaccctgcaggctcttcggcaaggttcgttacctgaccaaggaagtcgatgcgcgcattctcaacatgtccatctcgggcgtggcggtggaagttcgcgcaccgctgcatgcagcttccggcagccgggtgcagattctcgccgacgatctcggcgttctccacggcatcatccgctggacgcacaatggccgcgtcggcatccagttcgacccgaactccaacgcccgcgcccaggtcgcatcctacttccggttcttccacaaggaggtaaagccggtactggcgcgatgagcaatatcggccacgcgtagagcggaaccgatattcccctgtcatttacggggtttactccttcgaaaatcatcctactctcgccgccgggcgggcgtcgcgtgaattttcgaaggagttttcatgtcttccagttttgaacttccacccatgagccgtcgttcgcttctcaccggcatcgccgccacctccgcgctggttctgctgcatcccttcaccgcgcgcgccgccgccaaccaggcgcatctcaggctgatggaaacgacggatattcacgtcaacgtcttcccttacgactactacgccgacaagccgaacgacacgatgggactggcgcgcaccgcgacgatcatcgacacgatccgcgccgaggcggcgaactcgctgctgatcgacaatggcgacctcttgcagggcaacccgatgggcgactacatggcctatcagcgcggcctgaaggacggcgacgtccatcccgtgatcaaggcgatgaacacgctcggctacaccgtcggcacgctggggaatcacgagttcaactacggcctcgatttcatgttcaaggtgcttggtggtgccaacttcccgttcatctgcgccaacctgaccaagggccagctcgcctccgatccgaaaaacgacgagctcttcttcaagccctacgtcatcgtcgaaaagatgatcaaggacggggccggcaacgagagccccgtgaagatcggcttcatcggcttcgttccgccgcagatcatgctctgggacatcaagaacctcgagggcaaggcgcagacgcgcgatatcgtcgaggcggccaaggcctgggtgcctgtcatgaaggaagccggcgccgatatcgtcatcgcgctctcgcattcgggcatcgacggcagcgcccccaccgacaagatggagaacgcctcgttgcatctggccgccgtcgacgggatcgatgcgatctttaccggccaccagcacctcgtcttccccgggccgaagacctgggacggcatttcgaacgccgatccggtcaagggaacgctgcatggaaagcccgccgtcatggcaggcttctggggctcgcatctcggcctgatcgaccttctgctcgaaaaagacggcaagagctggaagatcgtcgacttcacctcggaggcccgcccgatctatcaccgcgacgacaagaagaaggtcgtggcggatgtcggcgacaagagggaggttatcgacgccgccaaggccgagcacgaggcgacgctcgcttacgtccgcacccccgtcggcaagacatcggcgccgctctattcctacttcgcgctggtggccgacgatccctcggtgcagatcgtcagccaggcgcagagctggtacatcaagcagatgctcgccgacacggaatacaaggatctgccggtgctctcggcggcggctcccttcaaagccggcggtcgtggcggcgtcgattattatacggatgttccggccggcgatctcgccatcaagaacatcgccgacctctatctctatccgaacaccgttcaggccgtcgtcatcaccggcgagcaggtgaagaactggctggagatgtcggcagggatgttcaacgagatcaaggaaggaacgaaggacgccgagcttctgaacgccgatttcccctcctacaatttcgacgtgatcgacggcgtcacctaccagatcgatctggcgcagccgcgcaaatacgacaatgacggcaacgcgatcaacgccggttccaaccgcatccagaaccttgcgttcgaaggcaagccgatcgatccgaagcagaggttcgtggtcgtgaccaataactaccgcgccggcggtgggggcaagttccccgagatcgcggccgacaaggtggtgttccaggcacccgatacgaaccgcgacgtgatcgtgcgctatgtgtacgaacagggaacgatcaatcccgccgccgacggaaactggaccttcaagcccgtgacgggtgcgaccgcgaccttccagagcgggccgaaggcgaaacagttcatcgccgacgtcaagggagccaagatcgaggacgcaggcgaaggaacggatggtttcgccaagttccgactggttctctagaacctgagacaggcgaggccgagcgcctcgcctactccgccgcgagcggcaggtcgggagccttgatctcgttcagcgacgccgtgaaatcggcatggttcgggcaggccgacagccgcgactggaaggcttcgatcagccatgtggcggccggccccggcggattggcgatccggcgcatcgcgtagatcgggtattcgccctgctcataggccggcaggtcgagatggacgagcgtgccattggcaagatcttcccggatgatggaggccggcagaccgccccagcccagaccgccacggatcagcgcatgcttggtggcgatgtcgctgacgcgccaggtcttgtaggacaagacgttgaaatcgcgccccttggtgagccccgaggcgtcggtgacgacgagctgcacctcctcgcgaacatcggcgagcgtcaacggcccttcgatatccgccagcgggtgggagcgcgcggcgaccgggatcatgaaggaatgaccaatcttttcgacggcgatcgaatcgtcctgcttcaggagcgctccgccgatgccaatcgtcgccttgcccgacagaacggcgtccatgaccatgccgagttcaccggcgctgagattgagcgtgacggagggaaagcgatcgcggaattccctgagcacggcgacgaccgcctgcgacggcaccatgacgctgatcgccacgtcgacctcggcctccaggccttccttcaggcttttcaccctcgcccgcatcacctgcaggtcggtcatcagccgacgggcgtcctcgagcatggccttgcctgcttcggtaagcttcggctgacgggcgccggaacgttcgaacagctgcatctcgagctgcgattccagattggcgatggtgtagctgaccaccgactgggcgcgattgagcacgcgggaggcggccgagaagctgccggtttcggcaacggtcaggaaaacctgcaactggtccagtgtcgggttcggcaacatcacatccatccaatcgatcgatagtcttgatcgacattatcccagttttttcgataggccgccagacctatttcttctcccgaagacgcggttcgatcatccccaaatcgacccggaaacgcaaagaccaaaggattatcaatcatgtcgtccattctgcttctgacatccagcccgcgtgctgactcgctttcgaccgatatcgccgtggacctggctggcaagctccaggcgcagaaggccggtagcgtcgtcgttcgccgcgacctcgccgccaacccgctcgcccacatcaacgacctgttcaccggcgccatccgcaagcccgcggacgcccgcacggtcgaggaaaacgaagccgcgaagatctccgacgaactggtcaacgaactgctcgccgccgacaccatcgtcatcggcaccggcctcatcaacttcaacatctattcgtcgctgaagagctggatcgacaacgtcgcccgcgccggcatgaccttcaaatacaccgaaaacggtccggtcggccttgccaccggcaagaaggtctatgtcgttctcgcctccggcggcgtctactcgcagggtccggccgccggcatgaaccatgccgtaccttatctgaagaccgttctgggcttcatgggcatcaccgatgtcgagaccatctatgtcgaaggcctggcctttggccccgaggccgccgagaaggctgtgggcgcggccaaggcacgcgccgaagaactcgcgctcgccgcctgatatcagcggcagccggttcatgaaggcggtcggcttgccggccgtctttttatttgcggaaaattgcgatcagccggcgaccgtgaactcgtggacaccgctccggccgaagacgcagttgcggccgttcttcttcgcctgataaagccgctcgtcggcggacgacaggatggcggtgaagacatcgccgtcctcggtggtcgtcgccacgccgatgctgatcgtaaccggcttgccatcgggcgtggaaacgctgttttcgatcgtccagcgcaacctttcggcaaggcgcaagccctcggcttgatcggtcaaggggcagatcgccacgaattcctcgccgccgaagcggaacacccggtcgcctgcccgcaggatcgtgccgagccgcgcggcgatggcgcgcaggacatcgtcgccctgcaggtggccgaacacgtcgttgacgttcttgaagtgatcggcgtcgaggatcatgaccgtcgccgactgtccctggcgcagcgattcgcggatcatgaccggcgcctccagttccattcgggtgcggtcgtaaagtccggtcagcacgtcgcggccggtgcggctcagaagatcgttgtagcgttcgcggaaagtcaggtcgctgaagatatcgccgatcggacgcacgcttgacgtggtgacggcgtgaccgatccatttctcgtaaatcgcgaagagcaccgtgtagatgcacacggcgagcatcttcgccttccacccaccccagaaagcggcgaccggcacgccgaccgaatagtgcagcgcgccgaagaaggcgatctggtcgaaggtcagcatcacgaagccgcagatcatgaagcgcagcacgggacggtgccgcagatagcggcccagccgctcataaagcaggatgatgccgatcgcgtcgagatagaggatggccgtgccccagagcatcagccaacccatttccttcagaaacgcgtcgctcgggacggtctccggcgtaagctgtagcggcgcgtgccattgcacgatccaggcgatcgcgaccgtcagcaggttgccgatgaagagcccgtagatcggctggcggacgacggcggcatcttcctgaagatagagcatcaggatcatcatcagcttgccggtgaagaacaccgacgatcccggcgagacgatgccgaacggcagctcgatataaaagaccgccgcgagataggtctccatgaagtgcatgacgccgagcgcggtcaggaaaatgccgagaccgatgcgggcgcgaaaatgcagcagcgtcaccatcagcgtgaaatagccgatggcttcggcgatgaagaggatcagattgacgttcgcgatcaacgccgagacctcccgcgatgcggctgcgccagcccggtaccgccatgccgcgcgacgccgaccatgctgtcggcgacattggaaacggcgatgctgcgggcattttgtggcactggatattcctgctcgatctggtgaccgcaggatcgccgcaatgttttaaaatagcatgagggaatggcggcgcggctgcgcgacacgcaactgtcgccgcccgccagccttcggtgatcagacctggcgaaccttggctccgtcgctgaacagggacggtccgttctgatcgatgatctgctgcgccttgcgcacggtgcattcgatggcatcatccgtcgacgaaaacatatcggcgcggatgaaattgcgcaccagcaactcgtcgccgaccgtcttctcgatgcggccggccagacggtattggccgccttccttcagaggttcggcgtaaatcgtgcaatcggcatagggctgcggatcggaagcgacgctggaagaagccgcgcccggcggcttcccgccgcccgagaacatggagaaaatgctggaaaatatcgaagccattgatacgcctttattgtgatgggcgatgccgtcagggttagatagggccgctaccgtcaaagttaaatgatgaggttggcgaggatctcgttttcggtgatgtcctcgaaaccgatgccggacgcctcgaaattcgcgaacagcgccgcgaagttttccggcgccttggtttcgatgccgatcaggacggagccaaagttgcgggcggtctttttcagatattcgaagcgggcgatatcgtcgtcggggccgagcaggttgaggaagtcgcggagcgcgcccgggcgctgcggaagcctgagaatgaagtatttcttcaggcccgcgtaacgcatggccctttccttcacgtcgggaagccgctcgaaatcgaaattgccgccggaaacgatcgcgaccaccgtcttgccgcggatcgcttcgggatccatcgtggcgatggccgtcagcgacagggcgccggccggctccagcaccacaccctcgacgttcagcatctcgttgatcgtcacgcagatcgcattttcgggcatcagcatgacctgatcgctcgggaagtccttcagcgccgcgaaattcaggtcgccgatgcgggcaacggccgcgccatcgacgaagttgtcgaccttggagagcgtcaccacctcgccggcctcgatgctgcgcttgaggcttggcgcgccaagcggctcgacgaagaagaaaccggtgctcgcaacggtgtccttcagataaccactgacgccggccgccaggccaccgccgccgacaggcaggacgacgagatcgggcaccgtaccctcgggcaactgctgcatgatctcggaggccaccgtcgactgaccctcgatgatatcctcatgatcgaacggcggcaccatgacaccgtcgatcatctcgacgtggtcgcgtgcggccttgtagcactggtcgaagaagtcgcctgtcagcttgatggtgatgaactcgccgccgaagatgcgggtcttgtcgatcttctgctgcggtgtcgtcaccggcatgaagacgacgcccggaacgccgaaatggcggcagacgaaggcaaagccctgcgcatgattgccggccgacgcgcagacgaaggtcttgcccgaggcgccttcctcgatgcgcttgcggaagaaattgaaggctccgcggatcttgtaggaacggacgggcgacagatcctcgcgtttcagccagatatcggcgccgtagcgagcggacaaatgctcgttgagttgcagcggcgttgccggaaaaaggccacgcagagcctcctcggcagcttcgacattctgtctggtcacggtcacggtcccttgttattgcgcccaacgctatgccataggcagacaatcgaaagaagcccattttcaaccacaacggttcggtagggcgctggtggcacgcgcgctcggacaagcgccggcataacgcctgctgcgccatcgagataacgcaatcgtgcggagaaaccgcccgacgagatgattattgtgagttttatgacagcagacaaactttccaagccgatcgcctggctcctcctcgccgccatcatcttcgtaacggtttcgccgatcggccttcgtccccatacgattacgtcagtcaacatcgacagggcgctcgcctatctggtcgtcggcctcgccttcgcactggcctatccccggcactggatcatggtcgccgtgctgctgatcgccggtgccttgttcatcgaatacctgcaatatctctcacccacccgccatgcgcgccttcaggacgccggcgtgaaagccgtgggcggcacgatcggtgtctttgccggatcgattttcaacagggttcgcgccgcgagagcgaagcatcttgacgcctgccagcgcacgcatgcccttgactgaatcgccgcagtcgttgaatgagaagcctgcgcgggcgtggcgaaactggtagacgcaagagacttaaaatctctcggccttggctatgcgggttcgatccccgccgcccgcaccaactcctccgccgcccaagaatagccgaagatacgacgagcggctgcgatgcatatatgagactccgcttaactacttaataatatctctttcttgcaacgttagaatgtgtttgtatgccgcccgtcagcaaagctacggctttagggcgtgtatttgtaaagcttgtcttgtggtgggagtaagacgatggtttacgattgggatggcgccagaacacggcgcctgagactgtttaaaacaggcacggcattcttgatcgcattggcagcattcgcggtaccgctgttcgtctacacggcaaaattcagcggattctaagattagacgacagcagcaatcagcagcgacagtttgatattatgacggcgtttcgacgccacacatgaaaaggcgcggcccgaggccgcgccttcactgtttcaggcgtttctggctcaggcgagcttggccgcaagcttggcgacatgcgcgccctggaacttggcggcgtcgagctcgatcgccgagggctggcgcgaaccgtcgccgtcggtaatcgtggacgcaccatagggcgagccgcccttgatctcgtcaacgcccatctggccctggaaagcatagggaagtccggcaacgaccatgccctgatggaggaaggtcgggatgaagccgaggatggtggattcctggccgccgtgctgcgtggcggacgaggtgaaggccgaaccgatcttgccgaccagcttgccggcgaaccagaggccacccgtctgatcccagaagttgcgcatctgcgatgcgacggtgccgaagcgggtgccggcgccaacgatgatcgcgtcgtattcggcgagttcgtccacggtggcgatcggtgccttctggtcgagcttgaaatgcgatgccttggcgacctcttccgacaccagctcgggcacgcgcttgacggtcacgtcggcaccggcggatttcgcgccctcggcaacggcatatgccatcgtctcgatgtggccgtacgcagaatagtaaagaaccagaaccttagccatctcagcagtttcctctctccgggttgcggcgggtgctgcgattggcgcaccgaccaaaattcgtttgatgaattcgcggatcataaagaacgcccacgacgcattttgtctaggcgatagctagcgcaagagcctggcggcggccagtggcgccacggaagacggactgttcaatcttatcgcacgcttttggcttgcgttcacatttgcgtatgcatgggcgcaggcttcccgtttgccctatttggtataagctcgacgccaaagatgaagacagagacctgcaatgacccaacagattgtgaccgcagccattctggcaatcggcgacgaacttttatccggccgtaccaaggacaagaacatcggccacctcgccgatatgctgctgctttcaggcatcgacctcaaggaagtccgcatcgtcgccgacgaggaggaggcgatcgtcgaggcgctgaacgcgctccggacaaaatacgactatgtgttcacctccggcggcatcgggccgacccatgacgatatcaccgctgatgccgtttccaaggccttcggtgttgcctgccatcatgacgagaaggcgatggcgctgctcggcgagatgtacaagcgccgcgacatggagttcaccgaggcccgccagcggatggcgcgcatgcctgttggcgcgacgcacattcccaaccccgtctccacagcgcccggcttcgtcatcggcaacgtctatgtgatggccggcgtgccacaggtatttcaggcgatggtggacgcggtgatcccgaccctgcggaccggaacgccggtgctgtcgctggcgatctcctgcccctatggcgaaggcgatatcgggacgccgctggcggcgatccagaaggcgcatccggacaccagcatcggttcctatccgcgttatgtcggccagaagttctcgaccgagatcgtcgttcgtggccgctcgcaggcggtgatcgatgccgcgggcgccgacgtcgctgcgatgatcgaaggtattcgccgcgagcgggatatcctggaaaaccattcggcggaggcctaatttatttcgacaccggcctatgcggcttgatctcggtcaaggaaacaaatgccggccaagcgcattgcttctcttacggagtttttcatccgagcaaggagatacacatgtcttacaaaacgattcttgcgattctcgatacttcagacaattgcgccgccgtcgccgatctggccttcgcgctggcggctgaacacgatgcccatgtgatcgggctccatgccgaaacggtctccgtcgtgccgctcgttgcgcccatggagattcccgatcccgtcgcgatgcaggcgctgcacgagatggcgcatgccgaaaaagtcaagatcgagacgatcgttcgccgcaaggcggaggtcgagggcgtctcgttcgagtggcgcagctttgcctcctcgagcggctatggctcggcgccgctgatcgagagcgcccgcagcgccgatctgctggtcgcctcgcaggccgatccggcaataccgtcggacagtcacgtcgatgtcgataatttcctgctcgaaagcggacgaccggttctgatgatccccttcatcatacgccagccgaagccgatcaagcgggtgctcgtcgcctggaacggctcgaaggaggccgcgcgcgccacgttcgacgccctgcccttcctgaaggccgcggacgaagtggaggtcttctccgtcgatccggtcgacaacgcgctgcaatcggcagaggttgcgggtgcggaaatcgccgcgacccttgcacgccacggcgtcaacgtcacccttgcgacggcgacaacctcggacaagagcacgtcggccgttatcgagaaccgcctgtccgacagcagcatcgacctgctggtcatgggcgcctacacgcattcgcggctctggcagatgatcttcggcggcacgacgaaatcgctgctgcattccatgacggcgatgacgctgctttcgcgctagcaggcggctccgacagcgggggcttgcgttttgcaaccaaattccgctaattgccacgaccgacgacgagctccggcttcggtccttccatcgcgcagtctcggctgcgcgatttgcgtttgacgaaggaaacggaagagcgtccggccgccggcaaacggcgtgtcatcattcatgcctcggagcgagccaatgtcccttcccgataaagcctttcctgtttcctgggatcaatttcaccgcgacgcgcgcgcgctggcctggcgtctcgccggcctgaaccgcgagttcaaggcgatcgtgtgcatcacccgcggcggcctcgtgccggccgccatcatttcgcgcgagctgaacatccgcctgatcgagaccgtctgcgtcgcgtcctaccacgattacgtgaaccagggcgagatgatgctgctcaaggggatcgcagcggaactgcttgaagatggcggcgaaagcgtgctcgtcgtcgacgatttgacggataccggcaagacggcctccgaggtccgcacgctgcttccgaaggcacatttcgcctgcgtctacgcaaaaccacagggtgtgcctgtcatcgatacgttcgtcaccgaggtgagccaggatacctggatctacttcccgtgggatatgggtttcagctatcaggaaccgatcgccaagagcaccaagggctgattttccagcgccttgcttgcacaaagactgaagcaaccataaattgttccaatctttgtttactaacatcaccaaattcgctgtccggccctcgccgtccgccgtatgatcatatggcttcaggcggcaagggcgccgcctgttgattgggtaggggcggtcgcgggcgcgacactggaaagaccatgcggcgttggcggtttatcggcgtgatcgcggctttcgggctgtgcttgaacgcgcaaccgcgcgcggtctctgccgaacccgcctatatatccgtcgtgcgcgaatacgtggatgcgctcgtcaagccgatgatcaacaaaccgatggttctggccgcgatcaagtcgcagaatttgaagttcggcgatgtcagcgcgactgatatccaggtgctcgacaacagctaccgctcggaaatcaagagcgggcaatggcagatggttacccgtctcctcaacaacccggtctcgcgctacctcaaatccaagcaggatgattcgcaaggaacgattgtggaaatcttcgtgaccgaccggaacggactgaatgtcgcgcagagtgtccccaccacggattactggcagggcgacgaaaacaagttcctgaagacgtttgcccggaactccgacgaggttttcatagatcgcgccagccgcgacgatgccacgcaattgctgcaaacacaggcaagtttcaccattcgcgacgagagcggagaagcgatcggaagcgccacggtgaccatcgccatcgacgcactttaaagccgtgttcggccttgcgaatcacaaggctcatttgggcgcgaaaagccaccggcaaatgacaaaatatggcgaaatttatccggctttggcatttgccttgcgcatctcgtagcaagccattgaaattcttgcccaactggtttttccccagtctccacaggccactccacaatatcttgtggtgaacacttcgttaagaacaagcccttgacggaatcgcctcttttcaagttaatgaagttcgatgttgcggcggcagctgaaccggacatgacgaggccggttctcaccagaaatcgagcattgaatcagggcgttgatccatgaggggtgagccgccatgagtatgttctgcgcgatttttgccgcctgaaaaagcgacatccggggctggcggaaaaaggctgttaatactatatttagtgattgcagccaccatcaccacaagatacaggatgacccatctccggatgacactcctgtgacgatacggaaacgagaactggctgcgctcctttcggcgccgccggaggtggaaacttgcgccttggtcaacggggacggggcgcgcgagctagaggttaaggcaaatgcgcatagaacgccgatttacgaaggcagatcagggcgcttacgcggctatcgaattccgcaaggcaaccagcgagatcaagaaccctgacgggtcgatcgtattccgcctcgagaacatcgatgttcccgcgcagttttcgcaggtcgcggccgacattctggcgcagaagtatttccgcaaggccggcgtccctgcccgcctcaagaaggtcgaggaaaacgacgttccttccttcctgtggcgctcggttgccgatgaggcggctctgaaggacctcccgaaggatcagcagtacggttccgaaaccgatgcgcgccaggtcttcgaccgtctggccggcacctggacctactggggctggaagggtggctacttctcttccgaggaagacgcggccgccttccgcgacgaactcgcctacatgctcgcgactcagcgcgtcgcccccaactcaccgcagtggttcaacaccggcatgcattgggcctatggcatcgacggccccggccagggccacttctatgtcgaccccttcaccggcaagctgacgaagtcgaaatcggcctatgagcatccgcagccgcacgcctgcttcatccagtccgtcgaggacgatctggtcaacgaaggcggcatcatggacctgtgggttcgcgaagcccgcctcttcaagtacggctccggcaccggctccaacttctcgtatctgcgaggcgaaggcgaacgcctttccggcggtggccgttcctccggcttgatgagcttcctgaagatcggtgaccgcgccgccggcgccatcaagtctggcggcacgacgcgtcgcgcggccaagatggtcgtggtcgacatcgaccatccggatatcgaggaatacatcaactggaaggtcaaggaagagcagaaggttgctgccctcgtcaccggttccaagatcgtcaatcgccacctgaaggcgatcatgaaggcctgcgtcaattgcgaaggcgacaatgacgattgctacgacccgaacaagaaccctgccctgaagcgcgaagtgcgcgctgccaagaaggaccaggttccggaaaactatatcggccgcgtcatccagttcgctcgccagggctacaaggacctcgagttcaagacctacgacaccgactgggattcggaagcctacctcacggtttcgggccagaactccaacaactcggtctcgatcaaggacgacttcctacgcgcagtcgaaaacgacggcgactggaacctgaccgcccgcaaggacggcaaggtcatgaagacgctgaaggcacgcgacctgtgggaatcgatctcctacgccgcatgggcctcggccgatccgggcctgcacttcaacacgacgatgaacgactggcacaccagcccggccgccggcccgatccgtgcatccaacccgtgctcggaatacatgttcctcgacgacacggcctgcaaccttgcctcgctgaacctcatccagttcaaggatgcggccaccaagcgcatcaacatcgccgattacgagcatgccgttcgcctgtggacggtcgtgcttgaagtctccgtgatgatggcgcagttcccgtcgaagcagatcgccgagcgctcctacgaataccgcacgatcggcctcggctacgccaacatcggcggcctgctgatgtcgtcgggcattccctatgacagcgacgaagcccgcgccatcgcaggctcgctgaccgcgatcatgaccggcatctcctacgccacttcggcagagatctcggccgaactcggacctttcccgatgttcaagccgaaccgcgaagccatgctgcgggtcatccgcaaccatcgccgcgccgcttacggcgagacgtctggctatgaaggcctgtcgatcaacccggtcgcgctcatccactccgagaacccggaccaggacctggcggctcacgccaagagcgcctgggacaaggctctcgagctcggcgaaaagcacggctaccgcaacgcccaggcaaccgtcatcgcgccgacaggcacgatcggcctcgtcatggattgcgacacgacgggtatcgagcctgacttcgcgctggtgaagttcaagaagctcgccggcggcggctacttcaagatcatcaaccgcgccgttccggaggcgctgcgcacgctcggctactccgagagccagatcgccgagatcgaagcttacgctgtcggccacggcaacctgaaccaggctccggcaatcaaccccggctcgctgaaagccaagggcttcaccgacgagacgatcgaagcgctgaacggcgcgctgaagtcggcattcgacatcaagttcgtcttcaaccagtggacgctcggcaccgacttcttgaagacgacgctgaaggtttccgacgaacagctcggcgacatgggcttcaacctgctcgagcacatcggcttctcgaagaaggacatcgaggctgccaacgttcacgtctgcggcgcgatgacgctggaaggcgcaccgttcctgaagaacgagcacctcgccgtcttcgattgcgccaatccgtgcggcaagatcggcaagcgttatctctcggtcgacagccacatccgcatgatggctgccgcccagccgttcatctcgggtgcgatctccaagacgatcaacatgccgaacgacgcgacggtcgacgattgcaagagcgcctacatgctctcctggaaactcggcctgaaggcaaacgctctctaccgcgacggctccaagctgtcgcagccgctgaacgcctcgctgatcgaagacgagagcgatgaggacgcactggaggatctgctgcagcagccggtcgccgcccaggccgtcaccatcaccgaaaagatcatcgagcgtgtggtcgagcgcgtgacccgcgaacgcgagaagctgccgaaccgccgccagggctacacccagaaggccgccgtcggcggacacaaggtatacctgcgcaccggcgaattcggtgacggtcgcctcggcgagatcttcatcgacatgcacaaggaaggcgcggccttccgtgcgatgatgaacaacttcgccatcgccatctcgctcggtctgcagtacggcgtgccgctcgaggaatatgtggaggccttcaccttcaccaagttcgagccggcaggcatggtcatcggcaacgacgcgatcaagaacgccacgtcgatcctcgactacgtgttccgcgaactcgccgtctcctacctcggccgccacgatctggcgcatgtcgatacgtcggacttctcgaacacggcgcttggcaagggcatccaggaaggcaagacgaacctcgtctcgaccggctggacccgcggctacaagccgacgatcgtttcgaacagcgaacgccaggcatccggcgagccgaagggctcggcaacagccgcccctgcccgcgcctcgtccggcgcgacggtgacgtctttcgcgggtgccgccgcccgcaagatcgagccgacggtcgcgatctcgacctccgaaatcgtcgccttcaagcgcgattacgaagagcgcgcgagggaattggccgaagagatcgccgaggaagtgctggaagaagtcacgaccgaggcgcagcagcaggcaaccgccctgttctccgacaaggccgcggctgacgccgcttcggccaagacggaagccaagaagatcgaatccgagcgccgcgcccggtcgatcatgcagggctacaccggcaacatttgctcggagtgccagaacttcacgatggtgcgcaacggcacctgcgagaagtgcgacacgtgcggcgcgaccagcggctgcagctgatcggcgttagagaacgccaggccaaataaaaaggccgtccgcttgtccaagcgggcggcctttctttttcaaggtgtggtctgcttttcgtagcgtgacttggcctcaacgcgcatccacgcccgtcgtgtgcagcttggttctcacatggcggacgccatcgaccgaggatgcggcgagttcgaccttgcgggcgatgccgatggtctcgacggagccttcgacggtgacgacgtggccgtcggcgtggacctcgatgctgtcgatgtcgacttcggggacattctcgatgttttcggtgacccgcgcttcgagatcgtcgctgtcatcgcggtcgatcgtgtcggctcgcagcgaatccttcagccggttctcgttgccatcgcggtctatgccgtctatgcggaagcctggattgtcgcttctgtcgaaattcgcgggcgtttcaccgtaggcgccattttcaggcgctgcggacgatgatcccggtgtatccgcatagggccagccgtcgtcgatattgcgctcttcgaagtcgcgatagtcctcgctgcgcgacagcggcttctttccatcatcgttcatgggcatcgatcttctccttcagcgtgttttcaaacaacgcccaagaggccagatggttcgtcaattttgcctggcgtcgcctcgcggatgcaactgcgtctaccacaaccgctatctccggggtgcagccggttcgtggaaacaagctatggaatagcctagcccttgtgcgtcaaaacgcaagggagagagacatggcgacgtgcaaggcaagcaatggcgatacctgggagatctaccaaacgaatggccagtggcactggcggcgcagggcgcctaacggaaatatcgtcggcgcctcgacggaaggctatcacaatcgaagcgactgcatcgccaatgcccggcgcaatggaatgacctgcgatccggtctgaccggctcgactgtcgcggaattcgataagggaaggtgcgcggccgatcacatcagggctgcgcgcttccgattgctatcgagcagccttcggttcggcgaatgtcgcagcgccttgcaatggcacgtcatcggccacttcctgcgcgacggcggagaggtcgagattgccccagatggatttttccttgctgcgatcggcacggcgggatgtcttgatttcaacaacgaacggcttcgattgagcgcgcatgtgattcctactgaaaagcgttgaacgaatccatcaacgcagcgagcctatgaagcgttcccttgccgcgcaagcgcattcggcgtcgcaccccctgacctcggctgcctatacagcctcaagtcagccacgggcaaaaattcacccccatgacgcgagccgatgagggcgctgctaccgttttttcgtcgcgacgggcagccatgcaaaattgtttccggaaaatccttgaaggaacaatcaatgtcgactaggtagcacgtcgccgaatatggtggcgtccaggctcaggcttcgacgacgtccaatcggccaccttttcctactcgtgtagaggcaccggcagcggccccaggtcgcttatcgatcgtttgatcggcagccggtttgcaaacaaaatatcagcgtgcggatggcacctggacagcggaacggccgatcaacatcgctcgtttcgacggctagggagtcgctggcgccaaggaatgaaaaagactgcgaatgaccattaaagagcgttttctgaaacagcagcatgcctggatgatcggcgcatgctactcccgcaaacaccccgattttcatcgctatggcggcgtcgacgtcgccgtttccccccgctggaaagagtgtctcgacacgttcatgaacgacatgatcgacaccctgccccgcagcctgtccgagcgccgcctggcgctgcgcaatccgcgccggcctttcgagcccggcaatgtcgagtgggttttcgtcagcaagcatcgtggcctgcgcgcgcccgacggcacccggccggagttgcccgaagcgcgcctgcgccgcgcctgaatgctttcaagcgatcgactgtcgccggctggcggggttttcttgtccctccagccggcgaatttgtttcgggcgcctgttagcgccggcctcgtatgcttttcgtcagcacaatgagaatgaggccgacggcaacggcgagagcgccccaatagatccagggcgtctggtcgatcatgaagctctcggccggatacggaaaatagccgctgccctgtcccatccagatcaggccggtcaggaccagcaggccttcaaggccatagacgagcttcaccatcacatactcctccacggcgccctgctcattgcaggacgcgagctcaagccttcgggaaatcggcgccaaggctggtgtctttccacgcttcgatcagtgccaggcgctccttcagcttggccgtgaccgcgccatagccgaactcgccgagcacgaggtggcgcggcgcattctcaacctcggtgatcttgatgatcgcttcgccggcgcgcacgggatcgccgggttgctggccgctgtatccggccgtctggcgcatgcgcgcggcggctgtctcggcgtaatcggcgatcttgctctcggtctgccgcagcgaacggccggcccagtcggtacggaacgggccgggttcgacgcaggtgaccttgatgccgagcggcgcgccttcggcggccagcgcatccgacatgccctcgaccgcatgcttgctggccgagtagtagccggacgcggggaagccgatgaagccggccaccgacgtgatgttgatgacatggccgcgtctgcgcgtgcgcatgccgggaagaaccgcgcgcgtcatggcgaacaggccgaagacattggcctcgaactgatcgcggatctcgcggtcgctgccctcctcgatcgtcgactgatagccatagccggcattgttgacgaggacgtcgatccgtccgaagcgttcctcggcagccttcacggcggcggtgatctgggaggtgtcggtcacgtcgaggtcgacggcgagcgcgttctcctcatggccggaaacgagatcggcgacgcgagccttgtcgcgggcgctgacaacagtcggccaaccgcgggcgatggtgagtttcgccaactcgcggccgaagcctgtcgagcagccggtgatgaaccagacgggatttttgtcttgaggcatggtgttttcctgaaatgttcgtctgaaattgaaagcgcccttgggtgtcctttggggatctccttgggcgcgtcttgggggcaccttctgatctagggtgcagcccggcacttttccacaagggcgcggaacgtcgaacctgcggatgcaaaaaagccgcgcgctcgctggagcacgcggccggatcgaccaggattttcgtttcggcttactgcagggtacgcggcggcaggccctgggcaagcgtcgcgccctgctggacgggggccacgccggcgcccatgccatcaaggccggtggcgacgacggagacgcggaacttgccatccagattgcggtcgaagatcgcgccgacgacgatatcggcatcgtcctgcacttcgtcgcggatacggcttgcggcttcatcgacttcgaacagcgtcatgtcggaaccgccggagatcgagatcagcacgcccttggcgccgcgcatcgagatgtcgtcgagcagcgggttggcgatcgcggcttcggcggccttcatcgcgcgctcttcgcccgaggcttcgccggtgcccatcatggcgcggcccatgccgcgcatgacagacttcacgtcggcgaaatcgaggttgatgaggccttccttgacgatcaggtcggtgatgcagccgacgccggcaaacagcacgcggtcggcggtcatgaaggcgtcggcgaaggtggtcttcgcatcggcgatgcggaagaggttctggttcgggatgacgatcacggtatcggcagcctggcgcagcgcctcgatgccggcttcggccgtcttcatgcggcggttgccttcgaaggtgaagggcttggtgacgacgccgaccgtcaggatgccggcgttgcgggccgcctgcgcgatgacgggtgcggcacccgtgccggtgccgccgcccatgccggcggtgacgaagcacatgtgcgagccggccaggtgatccatgatctcgtcgatcgattcttcagcagccgcgcggccgatctcgggcagcgagccggcgccgaggccttctgtcacatgcgcgccgagctggatacggcgcgaggccttggatgtcgcaagcacctgcgcgtcggtgttggcggcaatgaattccacgccttcgaggctttccgcgatcatgttgttgatggcgtttccgccgccgccaccaacgccgatcaccgaaattctgggccgcatctcggaaattccgggcttggcgttcgtcatcgcaatctccttcgtgcgcattcttccatgggctccaccgcattatcgggacccgaatcgcgcatcagcctatgggcgcaagaaggcagaggcggggcgaaagaacaagatgcaggcttttctaaaatttatccggaaccttttttgaggttggcgcattagatcgattcaagccagtcaaaattccttttcaaatgaaagtccgcctgcccataaagagaggagtaccgcgcagatgcctatgctcgcttccagccagtcgatagcccctccgaaagaccatatcgtgaccgcacaggaagcgctggagccgctcttcctgcagatcgaagcggaagccgaattgcggatgatttccgcggcgctcaaggccggctggtcggccgaggatgctgtgaccgcaatcgacgaattgcgtcgcaccgagttgctgcccggcaatcgctgagcaccaaaaaatcattcgccttcgaggccggatggcctatctctaccgcggtcaagtgattgcggagataggatttcatgaccatcaagaccatctgcatttttggtgccggcgcccttggcgggatgatcgccacaaaaatagcggcgtcgattggacgcgacgtgacggtgtcggtcgtggcgcgcggagcgcatctcgacgcgatccgccgcgacgggctgacgctgcatgaggccggttcccagacgccgatcaatgtcaaggtagcggcgacggacaatccggccgatcttccgccgcaggacctcgtcatcaccgggctcaagggccatcagctcagcgccgccgccgaggggatgggcggattgctcaaggacgacacgcgcgtcgtcatgatcctcaacggcattccgtggtggtatttccaccgcgacgaccatcccgagttcgccgagctgcaattcgaggaactcgatcccggcggggcgctctggagccttgtcggaccacagcgagttatcggttgcgtcgcacatcagggcgccgaagtcagcgaaccgggcaaaatcaggctcagcaacaagggccgcttcatcctcggcgagccctcgggcgagatcacgggcgaccttgaggctattcaggccctgctgcggaaggccgatctcagcgtcacgctgtcaccggatatccgcaacgacatctggagcaagctgatgggcaatgcttcgttcaatccgatcagcgcgctgacgcgctcctccatgtccgatctcatggccgacgttgccgtcagcgaccagatcggcaaggtgatgaaggaggtcaaggcggttggcgaggcgctcggcgccaatgtgggcatgtcggtggaggagcgcctcgagcaggccagccagatcgggcccgtgcgaacctcgatgctgcaggacctccttgccggaaaggcgctggagatcacgccgctggttggcatggtcgtggcgcttggcaggctgacctccgttccgacgccggtctccgaaaccttgctcgcgatggtctcgcggctcgatcgcgagaactgcaagccggcctcctgaccggcttggtcagccgcttgcccctctcaaggcgctcacggaatgagtccggaaacccctccagcgccttgaaatcatctcgctttagttaagccagtccgccatgcggtcgaccgcctcggcgatctcggcttcggagccggcgtaggacatgcgcatcgcgcgatgtccctccagcggatcgaaatcgaggcccggcgtcgcggcgacatcgatctcggtcagcatgcgcctgacgaattccatgctgtcgttggtgaagcgcgtgacgtccacataggcgtagaaggcgccatccatcggcgaagcgatcggcagtcccatttccggcaggcgccgcatcaggaagtcgcggttggcggcatagcttgccttgtagacatcgagttcatcctcggcgccgagggccgcggcggcggcgatctgcgacagttccggcgcggagatatagaggctttgggcgacccgctcgaccggccgcacgaggcgatcgggaagcaccatccagccgatgcgccaaccggtcatgcaataatatttcgagaacgagttgatgacgatggcgtcgtcggtcaccgcgagcgcgctcgtctcctcgcccgcgaaggtcaggccgtgatagatctcgtcagaaatgaaggcgatcgaattggacgagcaatagtccgcgagttcggcaagcgccttgcgacccgtcacggtgccggtcgggtttgccgggcttgcgagaagaacgcccttcaggcggataccgctttccttctgggccgcctcgaggctttcgggcgtcagcgtgaactgcgtttcggcggcaacgggcacctcgacaaccctgagaccgagggccgcgagaatgttgcggtatgcgggatagccgggcctggcgatcgccaccgcatcaccggcatcgaagagcgacaggaatgcgaggttgaagccggcggaagagcccgtcgtgatcgcgatgcgcgcgggatcgatttcaaggtcgtgccgctcgccgtagtgcgttgcaagcgcctgcttcagatcaacgatgccgagcgcatcggtgtagccgatcctgccgtcgtcaagtgcggctttcgccgcgtcgagagccgcgcgtggtgccggatgagacggctggccgacggccatggaaatcacaggcaggccgctcgcgcgccgccgtgtcgcttccgccagaacatccattgcgtgaaacggctcgactgcactgcgtttggaaatggaaaacaagggtacttctctttcggctcgaattgcggcccgacaaatgccgcattagtaagttcttcacaatcccgcgaccacataacaaccgcgagaattcctgtttcaataggcccggatgcgccgtatttttgctgcttcgcattgcattccggtcgcgggactgtgatacccgaagcattggacgaccgacatcacccgcaaagacgaggatatcatggccattctcccgaaaatcttcatggcgctcgcgctgaccgcctccgttgtctccgcccagccggccgctgcactcgacgacgcgcagaagaaggagttcggcgacttcatcaagcagtatctcatcgagaacccggagatcatgctcgatgtccaggacgcgctgcagaaaaagcaggaagccgcacgtctggtcaaagccaacgcgacgatctcggaaaacaaggcggcgatcttcgattccaagtacgacatggcgctcggcaacccgaagggcgatgtcacgatcgtcgagttcttcgattacaattgcagctattgccgccgtgccctgtccgacatgcagaccatcctgaaaaaggatccgaacatccgcttcgtgctcaaggaattcccgattctcggccctgaatcggttgccgcccacaaggtttcggcggccttccgcaagctggcacctgaaaagtacagccagttccatatcgcccttcttggcagcgatggccgcgccaacgaagcaagcgccatagaggtcgcgcagtcgctgggtgtcagcgaaaaggaaatccgcgccgagatggcgaaggacccgaccgacgcctccgtgcaggaaacctattcgctggcgcagagcctcggcatcacgggcacgccatcctacgtgatcggcaacgagctggtgcagggcgcggtcggttacgaagacctcgagaccaaggtcaagaacatgcggacctgcggcaagaccagctgctgagccggcccccatcaaattgccggaatccgggtgcttcagccatgtggacaatatggcgtgattcctgatgccttatccaaagggctttcattaagcctttggtgagtctataggttgccctcgcacatttgacggaacactcgatgacgcaaaccattttcgtcctgaacgggccaaacctgaacatgctcggcaaaagagagccaggcatttacggcggcaagacgcttcaggacatcgaggcggactgcaggtctgccgggcgagagcttggcttcgatatcgatttccgccaaagcaaccatgaaggccagatcgtcgaatggctgcacgaggccgacgacaaggcaatcggcgttgcgatcaacgccgccgcctatacgcacacatcggttgcgcttcatgatgcgatccgcgccatttccattcccgttgtagagctccatatctccaacgtgcatgcgcgggaagaatttcgccacaagtcgatgatcgcgcccgccgtaaagggcgtcatctgcggcttcggaccatacagctacattctggcgctccacgcgctgaagaacgtcaccgcataaaaagacagggcaaaactcatggctgaaaaaaagaacggtatcgaccaggcactgatccgcgatctcgcgaacatcctcaacgacacggatctgaccgagattgaagtcgagcaggacgatctgcgcatccgcgtttcgcgcgccggcaacacgcagtatgtccaggcgccgatggctgcccccgcctacgcggccgctccggcggcgattgccgcgccggctgctggcgcagcacctgccgccgccgctccggcacgcaacccggccaacacggtcaccgcgccgatggtaggcaccgcctacatggcgccggctccgggcgcgcgcgccttcatcgaagtgggcgcgacggtcaaggaaggccagacgctgctcatcatcgaagcaatgaagacgatgaaccagatccctgccccgaagtcgggcaaggtcgttgaaattcttgtcgaagacggcgcgccggtcgaatacggccaagctctcgtggtcgtcgaataaggcggacgtcatggtctcgaaaatcctcatcgccaaccgcggggaaatcgcccttcgcgtgcttcgcgcgtgtaaagagctcggcattccctgcgtcgtcgttcactcgaccgccgatgccgacgccatgcatgtgcgcctggccgacgaaagcgtttgcatcggcccgccgccgtcgcgcgacagctatctgaacattcatcagatcgtcgctgcctgcgagatcaccggcgccgacgcggtccacccaggctacggcttcctgtcggagaacgcaaagttcgccgaaatcctcgaagcgcacggcatcaccttcatcggcccgaccgcggaacacatccgcatcatgggcgacaagatcaccgccaagacgacggcgcaggaactcggcatccccgtcgttccaggctccgacggcgaagtgaagaccgaggaagacgcgctgaagacggcagccgaaatcggttatccggtgctgatcaaggcgaccgccggtggtggcggtcgtggcatgaaggtcgccaagagccccgacgatctgatcgaggcctggtcgacggcccgtaccgaggcggccgccgctttcggcaacgaagccgtctatatggaaaagtacctcggcaagccgcggcacatcgaaatccaggtgttcggtgacggcgaaggcaatgccatccatctcggtgaacgtgactgctcgctgcagcgccgccaccagaaggtctgggaagaagccaactcgcctgccctcaacgtcgaacagcgcatgaagatcggccaggtctgcgccgacgccatgaggaagctgaagtatcgcggcgccggcacgatcgagttcctctacgaaaacggcgagttctacttcatcgaaatgaacacccgtcttcaggtcgagcacccgatcaccgaagcgatcaccggcatcgacctcgtgcacgagcagatccgcgtcgcttccggcggcggtctgtcggtcacgcaggatgagatccacttccatggccacgccatcgaatgccgtatcaacgccgaggacgcgcgcaccttcgtgccctcgcccggcacgatcacgcatttccacgcacctggcggtctcggcgttcgcatcgactcgggcgtctatcagggctacaagatcccgccctattacgacagcctgatcggcaagctcatcgtgcacggccgcacccgcgtcgaatgcatgatgcgtctgcgccgcgcgcttgacgagttcgtggtcgacggcatcaagacgacgctgccgctcttccaggatctggtcgacaaccaggatatcgccaacggcgactacgacatccactggctggaaaactatctggccagcaagccggcttaaccgcaatggcagggtcgcgcaggaaatctccaggcatcacaccggaaattctcctgcgcgcctattccatcgggctcttcccgatggccgaatcggctgacgatcccgagatcttctgggtcgaacccgaccttcgcggcgtgctgccgctcaatgatttccacgtttccaaaagcctcgccaagaccatccggcgcaaaccgttcgagatccgcttcgatcatgatttcgaggccgtgatcgccgcctgcgccgaggagacgtcgggacggccgagcacctggatcaaccagacgatcagatcactctacgcctcgctcttccgcatggggcacgcgcataccgtcgaggcatgggacggcgatgaattggtgggcgggctttacggcgtatcgctcggcgccgcctttttcggcgagagcatgttctcgcggcgcacggacgcctcgaaaatctgtctcgtgcatctggtggaacggctgaaggagaagggtttcgtcctgctcgacacccagttcacgaccgaacacctgaagaccttcggcgcgatcgacgttgcgaaggacgaatacgagcatatgctcgccgcggcgatggattcgccgcatctcgaattctagaaaactgctgtattacttggcggccttacttggcggacttgtcgggcgcgggcacatccgatgtcgccttgcagtccttcagccacacgtcgtagatcggatgctcgacggcgttgaggccggggctgtcggcgaacatccagccggtgaagatgcggcggatcttgcgatccagcgtgatctcgtcgacctcgacgaagccgtcgatcttctgggcttcggtctggtcgcgcgaatagcaagccttcggcgtgacctgcagggcgccgaactggaccgtttcattgacgtaaacgtcgaaggtggtgatgcggccggtgatcttgtcgaggccggaaaagacggcgacaggattgtcgatgcgggcggccagaaccgtctgcggcagaaaggacgagccaagcgccagagcgatcccggcggcacgcaggacagggttccgcgtgagaagcttcatatctttccgtctccaccgcatttcaaaaatagaaggccgcagtgtctgcggccattctgcgggtataggtcaattgtggccaaaagcggggccggacagcctatcagctgccgggcgtccatgcgtcgtagtcgccggtcacgcgcgggcgttcgccggcaacgacgagcgagcccggcggacgataagcctgcggcgaaccggtcgggttggcgcgatgcgcgacctgccaatccttggcgacataggtctccttggacggcggaacgtccgtgcggtagtgcatccagccatgccagcccggcgggatcgccgatgcgtccgcgtagcccttgtagatcacccaacggcgcggcagcccgaaggacgtggtgccgccttcgtagtagacgttgcccaattcatcttcgccgacgcgcttgccgaagcgccaggtcgcgaagcgggtgccgatcgtctgaccgttccaccaggtgaagatttgcaggaggagagttttcatgtcttttccttgtgcctgccttgggagcagacgggaccagaattcgatcttttgcttatgccgccagcagcgccggttgtccagcgattccgcagccaaaacagttcatttcagcgccatcttgaagccgagatgggacggttcgaagccgagccgctcatagaagcgatgggcatccttgcgcttggcgttggagacgagctgcacacgcgccaacccaagcgcggtggccttttcgatgcagaactcgaccatccgggcgccgatgccctggccgcgcatgtcgccgcgcgtctgcacggcttcgatgatcatgaaggacgttccgcgaccggtgagcgtcgtcgcgatcgcgatctggaaagtgccgatgacctcgccagccagctcggcgacgaacagcgtctgatcgggagaggcggcgataatctcgaaggcgcgctcgtagtcaggcagcgcgtcttcgcaaaccgtatcaccgtggccgccaatgtcgtcggcggcgaacatggcgatcaataccttcagatcgtcccggcgggcttcgcgaatgatgatctgcttggtcatggacaacgcttcaatagctcgcgagcggcttttcgaggatcagcgccgggatgccggattggccggggccgttgttttcggaccggccgacatcggcgaaaccgagctggtgatagaagccgatcgccgcctcgttgcgcggttcgacctcgagccgcatgatttcggccgccggaaagcaggtttcgagctcggcaaagatatcgcggccgatgccctcgcgctgcagcgaggggcgcacgtaaagcagatgcagcatgaccgtcttggtcatctcgccggacatggccgcatagccgacgccgccgatttccttgccgtcatcggccaccaggaattcggcgttcttgtttgccatgcgcgtcttcaacgccgcgggcgagaagagcgtcgcgaccagctcatcgaccttggccaagccaagcagcgcgtcgtaggtcgcatggaaggtttcgaccaggagagcgcgaaccttgtcgagatcgcgctcgctggcggtgcggacgaagtagaccattttcttccttccggcatcggctatccgaaaaccgcttcacacttttcggcgatgccggatgacctattcctcgacgatgccgagcttggtcttgaccagcgcctggacggcctgcgggttggccttgccgccggtcgacttcatcacctggccgacgaaccagccggcgagagcaggcttggcctgaaccttggcgacctgatccgggttggcggcgatgatctcgtccacggccttttcgatggcgccggtgtcggtgacctgcttcatgccacggctctcgacgatctcggccgggtcgccgccttcggtcagcacgatttcgaacacgtccttggcgatcttgccggaaatggtctcggccttgatcaggtcgatgatcgagccgagctgagcggcggaaaccggagtcgattcaatatccttgccgagtttgttcaaggcgcccaagaggtcgttgatgacccagttggcggccatcttgccatcgcggccctcggcaacggcttcgaagtaatcggcgatcgccttttccgacacgagcacggaggcgtcgtagatcgacagaccgagttcgcgcacgaagcgctccttcttgtcgtcgggcagttccggcagatcggctgcaagtgccgagacataggcgtcgtcgaactcgagcggcagcaggtcgggatcggggaaatagcgataatcgtgcgcgtcttccttcgagcgcatcgagcgcgtctcgcccttgccggcgtcgaacaggcgggtttcctgatcgatcacgccgccgtcttcaagaatagcgatctggcggcgggcttcgtattcgatcgcctggccgatgaaacgaatggagttgacgttcttgatctcgcagcgcgtgccgaaggcttcgcccgggcggcgcacggagacgttgacgtcggcgcgcatcgagccttcgtccatgttgccgtcgcaggtgccgagatagcgcacgatcgagcgcagcttggtcatgtaggccttggcttcatccgacgagcgcatgtccggcttggagacgatttccatcagggcgacgccggaacggttgaggtcgacataggacatggtggcgtgctggtcgtgcagcgacttgcctgcgtcctgctccaggtgcagacgttcgatgccgatctcgatatcctcgaactggccctgacggtccggaccgagcgagatcacgatcttgccctcgccgacgatcggatccttgaactgcgagatctgatagccctgcggcaggtcgggatagaaatagttcttgcggtcgaagatcgagcgcttgttgatctgcgccttcaggccgagaccggtgcggaccgcctgggcaacgcattcctcgttgataacgggaagcatgccgggcatggcggcatcgacgagcgatacgttggaattctgcggcttgccgaactcggtcgaggcgccggagaacagcttcgaattggacagcacctgcgcatggacttccatgccgatgatgacttcccaatcgccagtggcgccgggaatgaagcgtttcggatcaggcgtgcgaacgtcgacaagggtcatggaaatgctcttttgaggctatcttattcaactggtgaggtaacggaaatgaccttccggtgcaaggctttcggcatggtctcggccattgcggcgcggacagctggcatttttcggttgttaacgggccgccgctaaacttcgcggatgctcctcaccgatctcgccaaaatcatcggactgtttgccgcgtggaacgggctggtgttcgcgatctacttcgtcgacaagcaggcggcgcgttatggccagtggcgcatcagcgaaaagacgcttctgacgcttgccttccttgccggcagccccggcgccgtcagcgcgcagcaactgctgcgccacaagacccgcaaggagccgtttcgctccgagctgatggcgatctgcgtccttcatctgctcgccgtggtcgcgctcgtctccggcatcacggccagaatgcttgggctgatctagaaggcgccatacgggccatcgccatgcgacgacaccggcttcgacagcccaaccgaagggacgtcccgatcgagcttgggattgtaggcgaccgacaaccagtggatggcgtagccattcttcttgaaaaaggtgattgcctcattgttctcggcgtgggtctgcatcatcacgctatcaagcccctgctccgccacctccttctcgatcgaccgcaacagcgccgaaccgaggccatggccggtgaaagacggatcgatccagaagtcggaaatcgtctcatcgagattttcgcgcgcggcccagccggccgtgtggccgttccactcgatgacggtgatggtcagccagcgggtctcggcgaaattgaggaaggcattgcgggcggcgggcgccatcgcatccgcttcgccgatcggcgccatcgccctttgccaggcgcgcaggccgatctcgctcaggggcccggcttctccctcatgtgcattgcgaatcgtgatcaatcagaacctccgaaacaccgaggaaattaaagcactgaatcaggccatatcaaacctttacctcacgtcaggcaagatttgtcccgcattgcagcagacgagcttgcttgacgcggagacgggctcggcctatcaaatcccgatgttgagctcgcaatcagagacccggtagaggccctgccctcaagttttcttgcgcgcatgggcccgacgagaacgaaaccctgacgtcccatccggacgccagatcgtttttgtgcgcctttggatggcgcgataccggatcaacatctcatggacatttcacgcgcggaacagcgcatcctgcacctgctggcccagggcggccgcatcgaaatcgaacgcgacgacagacacaagatcgaaaccgtcaactgcctcacccgcgacggctggctctaccccggcttcgacctcgagcttttccgaaggctcaaacggctgaaggcgatcagatctcagaccggacagccatatcggatcaccgagcgcgggctgcggctggtacgctcgcaattggataaccggtgaaagggaaacggcgccatcggggcgccgttttcacttggccagcaatgccgggcgcatggcggcccactcatcgccgaacgaacctgtcgcagctgtcttgcccgcctaccgataccagtagccggcattccactcatcgccttcgatgcggtgacagagtgcgtggccccaatcgaaaggctgttcgccttcacgggcctggcagagattgtgcacggcctcccattccgctcccatcacgaaatccgcggcggccagacggtcgaaggcctcgacgagcgttgcaatctgcgatgccatttctttcctccactcgacgcatctaaagtgcgcaggactcccaggccgcaaaaccgacttcgccgaccagcatgtggtcggcgatggtcatgtccctgattttcagtccacttaccaccacttggcgggggtgaagcggccggcggcctgttcgatgacgtgagccgtcttgaagagggtctcttcctcgaacggcttgccgatcagctgcaggccgagcggcaggcccttgtggtcgaggccggcggggaccgcgatgccgggaaggccggccatgttgacggtgacggtgaagatgtcattgaggtacatcttgaccggatccgatgccaggtcctcgtcggcgacgccgaaggcggacgacggggtggcgggcgtcaggatagcgtcgacgccggcgtggaaggcgaggtcgaagtcgcgcttgatcagcgtgcggaccttctgggcctggatgtaataggcgtcgtagtaaccggccgagagaacataggtgccgatcatgatgcggcgcttgacttccttcccgaagccggcggcgcgggtcttctcgtacatgtcggcaatgtccttgccgtcgacgcgcaggccgtagcgcacgccgtcgtagcgcgcgaggttcgaagacgcctcggcgggcgcgacgatgtaataggccggcagcgcgtatttggtgtgcggcagcgagatgttgacgatctcggcacccgcatccgtcagccaggcgatgccctgctgccagagcgtttcgatttcttccggcatgccggcgacgcggtattcgttcggaatgccgatcttcatgcccttgagcgactggccgagcacggcttcgtaatcgggaaccggcagatcgaccgaggtggtgtccttggcatcgaccgaggccatcgacttcaggaggatggcggcgtcgcggacgtcgcgggcgatcgggccggcctggtcgagcgacgaggcgaaggcaacggtaccccagcgcgagcaacggccgtaggtcggcttgatgccgacagtgccggtgaaggcggccggctggcggatcgagccgccggtgtcggtggcggtggcgccggcgcagagatgggctgcaacggcagcggccgaaccgcccgaggagccgcccggaacgagctgctggttcgagccttcggcgcgccaggggttgatgaccgcgccataatgcgaggtctcgtttgaggagcccatggcgaactcatccatgttcagcttgccgagcatgacggcgccgtcgtcccacaggttctgcgtgacggtcgattcgtaatgcggcttgaaaccatcgaggatgtggctgcaggcctgggtgtggatgccttcggtggcgaagagatccttgatgccgagcggaatgccttcgagctcgccgcccttgccgccggcgagacgggcgtcggaggcttcggccatctgcagcgccttttcaggcgtcaccttgatataggcgttgagcttgtcgttggccgcctcgatcgccgagatataggcttcggtgagttcggtcgctttgatctccttggcgcgcagcttggtgcgggcttcggcaatggtcaggctggtgagttcgctcatgatggttcgcttcaaatcttgaatggcaacgaggtcggaaagcggcgaaaggccttattcgacgactttgggcaccaggaagaaattctgatcggtgacaggcgcgttggagacgatatcggcggccttgttgccgtcggtgacgtcgtcggtgcgcttcttcatcagcatcggcgtgacagaggtcatcgcttcgacgccttcgacattgacttcggagagctgctcgacgaagcccaggatcccattcaactcgccgaccatgcggtttgcctcatcttcggagacggcaatacgggcaaggcgcgcaacgcgcttaacggtggctaggtcgacggacatcatattctccggatgggattttcccacccgctataaaggccatgcccgtcgtgtgcaacgggcatggcgtttcgttcattcagatttccgccctttcaagacgggtggaagcgcgattgcgtcagaggacgacgctctcgctcggcttgatcgccttgacctcggtctttgcgccttccatgccggcaacgaacttttccggcgtctggtcgatgatcgggaaggtgccgtaatggcaggggagcgccgtcttgaagttgaagtagcgctggcaggcgagcgccgccaccgcgccccccatggtgaagcggtcgccgacggggacgaggccgatatcgggctggtgcaactcgttgatcagcgccatgtcggagaagatatcggtgtcgcccatggcgaagatcgaggcttcgtcgtcgaagtgcagcatcaggccgttggcattgcctagcgcgtgggagacgccgtcctcggtgatctgcgcggaggagtgcaacgcgttggtgaaggtagcggagaagccgccgagcggaaccgtgccgccggtgttgcccatctcgatcttcgagacgcccttggagccgagccaggcggcgagatcggcgttggcgaggacgacggcgccggtttccctggcgatggcgatggtgtcgccgacatggtcgccatggccgtgggtcaagaggatgtgggtgacgccggcggtgacatccttgatatcctggccggcgaaggaaccgttatgggtcaggaacgggtcgagaaggatggttgcctttgcgatctcgatacgaaaggccgagtggccgagccaagtgatcttcatgaaagctgtcctttattatctgatgcaaaagcctgcatcgatgggtatggagataaccgataccgccgcgaagaaaagcggtcgaggcctcaatttcttttgacgggatgaaacgacgatgacggtgttgacgatcgaggaactggcggcgacccttcagccgggacaggcaatcgccggtctcgacctcggcaccaagacgatcgggctgtcgatgtctgacctcggccggcgcttctcgacgccgcgcccggtcatcaaacgcgagaagttcaccatcgatgccgcagtgctcttgagcttcgccgagaaggaaaaggtcgcggccttcatcatcggcctgcctgtgaatatggacggatcgactggcccgcgggtgcaggccacgcgcgcattcgtgcgcaacatggagcagaagacggccctgcccttcgtctactgggatgagcgtctgtcgacggttgccgccgagcgggcgctgctggagatggatgtttcacgcgccaagcgggccgaacgtatcgattcggcggccgcgagtttcattcttcaaggcgctctggacaggctgtccttgcttggaaggaccgcgccggacgacctggacgcctgacgcgcccgccaccaggcgatgatcttcccgcgtctgcggaacagcaaaatggcgaagacgaccaggctgtcgacgacgatggcacgcgccaccagcggcgggatggtttcggccggaataccgagaatattggcgtagacctggaaggtcagatcatgggcctgacgcgtaagcatgaagatgccgaagctcatgtcgtagtaggatagccagtaccagcctgccagaaacacgatcggaccggcccagaagatcaggaaccacttcatgcggtcgcccctctttgtcgctttgcgaatggccgctcagccgagaccagccatgtcgaacatgccatcaagcccaataccagggccggtaccgcgatatcgagcgcgagcacggcaaagaacatcatcgcggcaacgaggaacaggattctcgcgattttcgttcgcatggttccggacaactcaaactttgaaactgcccggtaacctgacttcttaaacactctggcgcaacgtaaaccatttgttaaggttaacagcgatgcgggaggctgtgggaaacttcactcccgatcagccgtaaacgccgcgaacgatgcgtttcagcgccgcttccgccttctcccaatccttcgccgccttcaacgacaaaccggcgcactgcccgcccgccgaagccgagagaacgatgtgctggatggcggcgatgaggatcgcattgacggcgatggcgtcgacacccttgggcggcgcaagcgagccgcgcatccgctcaagccatgtggccagcgccttggaacgggcttcagagagacggcggacctgctcggtgttttcggacacctcccaggcgacgatgcggcgcatcagcgggtcgtcccgaagcgcctgcaggaatagcagcgaaagacgttccataaggtcgccgtaggtcagcaggaacatgccgccggtgtcctcgggaatgcggtccttcacccaggagccgagatcggcgccgatcgcgtcgaccagaccgttgaggcccccatagtagcgatagatcagctgtttgtcgcagccggccttgcgggccacggcgttgatgccgaagttctggaacccctcttccgcaagcagtgccttggcggcgttgaggatcgccttttccgtcgcgccacggtcacgcacacgcttttccggttcggcttgcggcgcgctcgcgatgggggtcaaaggcatgggatcattcagcatcggggactcggatttcaggtgtcactcaccggtgagtaacaacaccgcctccaaccggcaacggcgaaccccttgaaagattgtggattgttttcaggccactcgcggcgggcagccgaatgtcgccgcatggcgacatcgatcagagcgtctggccgaaccagactgtgcgctctgacggttcgacgagcggcggcccgaggcgggtgaagccgcgcgagccccagaagccgatgccggcggcgttcgttgcgctggcgccaagatgcacggacttcacacccgcgtctcgcgcttgcgaaagccacaggtcgagcagcttggttcccatcccctgcccgcgcagacgcgacagcaggttcatatggatgtgagccggaaacgcctcgatgatggccgacggcgccgacgagggatgatggatggctgagatgcgtttctcgtcggcgttccagagctcaggatcgccttcagggtcgggataggcgctgcgcagcgtcggccaccagtcgcgctcgagctccgcctgaaatgcaagggtatcatggacaccgacgatatagccggcgacgccttgcgcatcctcggccacgaaggcggtgtccgggctgagcgtcacgtagggcgcggaatagatgtggccgatgagcttgccgtcaccatgcagtgacgtcgcgtccttgcccgcgtcgccggtgaccagcgagatgttgtagatctgttcgagatcgtcgagccgggcttggcgcagcgttgtcgtcatcagcttgccggcggatagaggagatcgacgatatagctggcgtcgaagcggctatcgagcatgccgtaggtggagcgccagccgccggcgagacgggtttcgatgaaggcatcggcgatgcgccctgcccccaggcgataaagttcggcggcaccggctgcgagcgccagctgctcgacgagcaggcgggcggcgccctcgtcgcgctcgcagagcgccatggcggcgcggagcacgtcgatggtcttcttgccggccgggccgagatccctcgcaaggcctgcgaagacggtctcgaaaagatccttgccgcggttcaatatgcgcagcacgtcgagcgccatgacgttgcccgagccttcccagatcgcattgacaggcgcttcgcggtagtggcgggcgatcgggcgttcctcgatatagccgctgccaccgatgcactccatcgcttcatagatcagcgccggcgcgatcttgcagcaccagtatttggcaaccggcgtcatgacgcgggcataggcggcctcttcggcgctgccgcgcgcgcggtcgaaggcgtcggcgaggcggaaggaaagagccgtggcggcggcgacgtcgagcgccatgtcggcaagcacgcgggtcatgatcggctggctgaccagcgtctttccgaagacgttgcggccgcgcgcgtggtgcacggcctcggccagcgaggcgcgcatgatgcctgatgatgccagagcgcaatcgaggcgcgtcagcgtgaccatgtcaagaatggtgcgaacgccggcatccgggccgccgagcaggaagccgaatgtatcgctgaactccacctcggacgaggcgttcgagcggttgccgaccttgtccttcaggcgctggaactgcaggccgttggccgatccgtcctcaagcaggcgcggcaccaggaagcagcccatgccttccttggtctgcgccagcatgatgaaggcgtcgctcatcggcgcggacatgaaccatttgtggcccgacagccggtagatgccctcgctgaccttttcggccgaggtggtgttggagcggacatcggtgccgccctgcttttcggtcatgcccatgccgatggtcacggcggatttctgcatggccggcttgtttgacgaatcgtatttgcgcgacaggatcttcggcgcccagtccttctggacggctggcgacgcggagagcgcggccacggacgcgctcgtcatggtgatcgggcaaagatggccggtctcgagctgcgacgagagatagaagcgagcggcacggatcttgtgcgcctgatccttcgcctcggcatcggcctgtggatcccacacggaagaatgaagaccgacggacatggagcgccgcatcagcgcatgccaggccgggtgaaactccacgacatcgagccgttcgccgcgcgggccatgggtgcgtagctgcggcacgccctggttcgccatgcgcgccagctcctgcgcttccggcgaggtgacgtagcggcccatattgtcgagatcatcgcgaatgccgcgcggcaacgcgccagtgaggtcgacgatcaagggatcggacctgtaggcgttgatgccggaccacaggctcggctggttgagttcggcgagtttttcttcagcggatgtcatgaatcgcttctagagtatgaggcgggcaaagggaaaccggaagtttggcagtgcttctgctttagcccaattgcgacaaaattgcagggggagagcgcgctttgcccacagcgcatgcttgccgccgccgcacgcactctttatagagccgctgacgacagcatagaggcaggttcatggtcttctttccccaccgccacctcatcggtatcaaagggctcaccgagcaggatatcacctttctcctcgacaaggccgacgaggccgtcaagatcagtcgacagcgagagaagaagacgtcgacccttagaggtttgacgcagatcaatctgtttttcgaggcatccacccgcacgcaggcctccttcgagctcgccggcaagcgcctcggcgccgacgtgatgaacatgtcggtcggcaattcctcggtgaagaagggcgaaacgctgatcgatacggcgatgacgctgaacgcgatgcgccccgacgtgctggttatccggcactccagcgctggcgccgcggcacttctcgcgcagaaggtttcctgctcggtggtcaacgccggcgacggccagcatgagcatccgacgcaggcgctgctcgacgcgctgacgatccgccgcgccaagggcaagctgtcgcgcatcatcgtcgcgatctgcggcgacgtgctgcactcgcgcgtggcgcgctccaacatcctgctcctcaacgccatgggcgccagagttcgcgtcgtggcgccggccacgctgcttccggctgggatcgccgacatgggcgtcgaggtcttccactcgatgaaggaagggctgaaggacgccgacgtcgtcatgatgctccggctgcagcgcgagcgaatgtccggcgccttcgtgccgtcggtgcgtgaatacttccatttctatgggctggacgcggagacgctgaaggcggcgaaggaggatgcgctggtcatgcacccggggccgatgaaccgcggggtggaaatcgcttccgaagtggcggacgggccgcagagcgtgatcgccgaacaggtcgaaatgggtgtcgccgtacgcatggctgtcatggaaacgctgctgatctcgcagaaccagggtccccgcagcgaaggagccggcgcatgagcaactcgatcgtcttcaagaacgttcgcatcatcgacccatcgcgcaatctcgacgaggtcggtgcgatcatcgtcaaggacggtgtgatcgtcgcctccggcaaggatgcgctgaacgaggccgtgccggcaggcgccacagtgcgcgactgcaacggtcttgtcgcagcgcccggcctcgtggacgcgcgcgtccatatcggcgaacctggtgccgagcatcgcgagacgatcgaatccgccagccgggcggcggccgcgggcggcgtgacctcgatcatcatgatgcccgataccgaccccgtgatcgacgacatcgcgctggtcgaattcgtgaagaagaccgcccgcgacaaggcgctggtcaatgtctatccggcagcggcgatcaccaagggtctcgccggcgaggagatgagcgagatcggcatgctgatggaagccggcgcggtggcgttcaccgacggccgctccagcatccacgacgcgcaggttctccgccgggtgatgacctatgcgcgcgaattcggcgcggtgatctcctgcgagacgcgcgaccagcatctggccgccggcggcgtgatgaacgaggggctgttcgcaagctggctcggcctcagcggcatcccgcgcgagaccgaactgatcccgctggagcgcgaccttcgcatcgccaagctgacgcgcggcaagtatcacgcggcgatgatctcggtgcccgaatccgtcgaggcgatcgaactcgccaagagccgtggcgcgaccgttacctgcggcatttcgatcaacaatctggcactcaacgaaaacgacatcggcgagtaccgcaccttcttcaagctctatccgccgctgcgctcggaagacgatcgcgtggcgatggtggatgcgctagcgcgcggggcgatcgacatcatcgtctcctcgcacgacccgcaggacgtcgacaccaagcgcctgcccttcggcgaggctgccgatggtgccgtcgggctcgagaccatgctggcggcggcacttcgcctgcaccacagcgggcatgtgacgctgatgcgcctgatcgacgccatgtcgacgcggccggcacagatcttcggcctcgatgccggtacgctgaagcccggcgccaaggcggatatcgtgctgatcgatctcgaagagccttggattgtcgccaaggacatacttctctcgcgctcgaagaacacgccgttcgaagacgcgcgcttcagcggacgcgcggtcgcgacctatgtcgccggccagtgcgtgcatacgtcatgaactgcgtgcatagattataagaagacagatggggataagaaggcaagtgggggaacatgggcgctgatctcatgacgtggcagataacctggcaaatcgcgctggcggcggccgccatcggctatctgctgggctccattccgttcggactgattttgacgcgcgcagccgggctcggcgacgtgcgcagcatcggctccggcaatatcggcgccaccaatgtccttcggaccggcaacaagaagctggcggcggcgacgctgctgcttgacgcgctgaaggcatcggcggcggcgtggatcgtgctctatgtctacggaccggaagccgccgccattgccggcttcttcgccttcatcggccacctctttcccgtctggatcggcttcaagggcggcaagggcgtcgccacctatatcggcacgcttctcggcgtcgcgccgctgatggttctggccttcgcggcggtgtggctcggcgttgccttcgtcacccgctattcttctctttccgcgctggttgcaatgcttgtcattccggttgcattgtggatactgggtgcagagaaggttgcagcaatcatggcgatcatgaccgtgatctcctactggaagcacaaggccaacatcagccgcctgttgagcggcacggaaagcaagatcggggcaaagggataggatagatggacgcacgcagcgcaaggccaaagggaattgcgctgacggacaggcaaaggattgcctggttgcgcctcatccgctccgacaatgtcggcccggccacgtttcgcgatctcatcaaccacttcggttcggcggaagcagcccttgccgccctgcccggcctttccacacggggcggcgcgacacgggcgatccggatcgccaccgagagcgaagcactgaaagaactcgatgcggcccacaggttcggcgcacgctttgtcggcatcggggaaccggactatccgcaggcgctgaaacagatcgatggagcgccgcctctgctggcagtaaaaggcaatctcgcgtcgaccgtgcagccggccgtcggcatcgtcggctcgcgcaacgcctcgatatcaggcgcgaagttcgcggcgatgatcgccagggaatgcgggcgcgtcggctacgctgttatctccggccttgcacgtggcatcgacacggccgcccaccgcgccagcctcgacaccggcacgatcgccgccatggccggcgggctggaccagccctaccctcccgagaatgccggactgctcgaggaaatctggaacggcaacggcctggccgtcagcgaaatgccgttcggctgggagccgcgggcacgtgactttccgagacgcaacagactgatcgccggcatttcacttgggacggtggtggtggaagcggcaacacgatcgggctcgctgatcacggcgcggctggcaggcgaattcggtcggctggtattcgcggtgcccggctcgccgctcgatccaagatgccatggcaccaacgggttgctgaaggacggcgcgatgatcgtcacggcgcctgatgatgtcatcagcgcccttgcgccgctatcccagctcgacctgtttgccgcaccacttgccgaagagccggaacgcggcggcgcctcgtcgctgctgccgcccgatgagaccgacagggcgcgcatcgtcgatgcgctcgggccgacgccagtcgagatcgacgatatcatccggcatacgggtctcagcgcctcggccgtctatctcgtcctcctggaactcgacatcgccgggcggttgcaccggcaccccggcgggatggtgtccattgcaatggaggtatgacgacttacatacgagcgtggaggtcgccggcttcgacatatgccatctcgatcagatagcagagcatatcggccttttccttttccgccacctgccgcaactcggcgagcatctggcggatgaaggcaatgttctcgcgggagccggatcggccggtatccctctttgcgtacttagccgtcatgaatgcactcgcgccccgattgggaagggttgatcgtcgcagcctgaaccacacgcgaaaaacgatatcgtaataatcagaaattgcaatatgtcttgcatcgtcttttggttgcaaggcgttgcaatgcgtaaaaatgcgttcaaagcacttgaccgaaacgaattccctgtccatgtcggagaaccggcgcgcgtggcacggcaggtcctctgccctgagataggccggctggcatccatttttagagaatcatcatgaatgttgtagtggtggaatcgccctcgaaggccaagacgatcaacaagtatctgggacccggatacaaggtgctcgcctcttttggccacgtccgcgatctccccgccaaggacggctccgtgctgcccgaccaggatttcgaaatgctgtgggaggtcgatggggcctcggccaagcgtatgaaggacatcgccgacgcggtgaagtcctccgacggcctgttcctggcgaccgaccctgatcgcgaaggcgaagcgatctcctggcatgtgctcgatatgctgaacaagaagcgtgtgctcggcggcaagaccgtcaagcgcgtcgtgttcaacgcgatcaccaagaaggccgtgctcgacgcgatggcggagccgcgcgatatcgacgtgccgctggtcgacgcctacctggcgcgccgcgcgctggactatctcgtcggcttcaatctttctccggtgctctggcgcaagctgcccggcgcccgctcggcgggacgggtacagtcggtggcgctgcgactggtctgcgaccgcgagtccgagatcgagcgtttcgtctccgaggaatactggaacatttcggcgctgctgaagacaccacgcggtgacgagttcgaagccaagctggttgcggcgaatggcaagcggttgcagccgcgcgcgatcggcaacggcgacgaggccggcaagctgaaggcgctgctggaaggcgcgtcctatgtcgtcgacaccgtcgaggccaagccggtcaagcgcaacccgggaccacccttcacaacctcgacgctgcaacaggccgcctcctccaagctcggattctcggcatcgcgcaccatgcaggtggcgcaaaagctctatgaaggcttcgacatcggcggcgagaccgtcggtctgatcacctatatgcgtaccgatggcgtgcagatggcgcccgaggcgatcgacgcggcgcgcagtgccatcgtcgaccagttcggcaagcgctacctgccggaaaaggcccgcttctattcgaccaaggcgaagaacgcccaggaagcgcacgaagcgatccgtccgacggacttcaaccgctcgccggacaaggttcgacagtatctcgacgccgaccagatcaagctttacgacctgatctggaagcgcggtatcgcgagccagatggcgtcggccgagatcgagcgtacgaccgccgagatcatcgccgacaacaacggcgacaaggccggattgcgcgcggtcggctccgtcatccgcttcgacggcttcatcgccgcctatacggaccagaaggaagacggcgagcagagcgacgacggcgacgaggatggtcgcctgccggagatcaatgcgcgcgaaaacctcgccaagcagaagatcaattcgagccagcacttcaccgaaccgccgccgcgttattctgaggcgtcactgatcaagaagatggaagagctcggcatcggccgcccgtccacctacgcggcgacgctcgcgacccttcgcgaccgcgaatacgtgatcatcgacaagcgcaagctgatcccgcactccaagggccggctggtgacggccttcctcgaaggcttcttcaccaagtatgtcgaatacgacttcacggctgatctggaagagaagctcgaccggatttccgccggtgagctgaactggaagcaggtgctgcgcgatttctggaaggatttcttcgcgcagatcgaagacaccaaggaactgcgcgtcaccaacgtgctcgattcgctgaacgaatcgctcgcgcctctggtgttcccgaagcgcgaggacggcagcgatcccaggatctgccaggtctgcggcacgggcaacctgtcgctgaagctcggcaaatacggcgccttcgtcggctgctcgaactatcccgagtgcaattacacgcgccagctttcttccgaaggcggcgccgaagccgagggtgctgcactcaacgagccgaaggcgctcggcaccgatcctgtcaccggcgaggaactcacactgcgctccggccgcttcgggccttatgtccagcgcggcgacggcaaggaggccaagcgctcctcgctgccgaagggctggaagcccgaggatatcgattatgaaaaggcgatggcgctgatttcgctgccgcgcgatatcggcaagcatccggaatcgggcaagatgatctcggccggcatcggccgttatggccccttcctgttgcatgacggcggctacgccaatctcgagaccgtcgaggacgtcttcagcatcggcctcaatcgcgcggtcaccgtgatcgccgagaaggccgcgaagggtcccggcgggcgtgggcgcacggcagcggctgccctgaaggagctcggcgagcatcccgatggcggtggcgcgatcaccgtgcgcgacggcaagtacggcccctacgtcaactggggcaaggtcaatgcgacgctgcccaagggcaccgatccgcaggcactgaccgtcgaggaagccgtggcgctgatcaccgccaaggccggcaaggcgccggcggccaagagcaaggcgaagccgaaagccaaggccgcggcgagcgatgacgcgaagccggcaaagacggccgccaagccgaaggccaaagccaaggcgcccgccaagaaagctgcggcgcccgcgaagaagaaaaagagcgaagagtgaccagaatcccgcgggaaccaaagggcatgggcaagcgtcccgacaagacgggacgctccagcagggcgcccgccgtcgagccactcaacatccagcacggcgcgcttccttcgcgcgaggtgatcctgcgcttcatcgccgatcatccgcagaaggcatccaagcgcgagctcgccaaggccttcgggctgaagggcgacagccgggtcgagctcaagcacctgctgcgcgatctcgagcaggaaggcatgctgcagaagacgcgcaagtcgttgatccgtcccggtgcgctgccgccggtcacggtgctcgacatcaccacccgtgacaaggacggcgggctgatcggccgtccggcggagtggtcggacgaaatgggggtggcgcctgccgtctccatccggcagtcctcctcgcccgccggccgcaacggcaagggcaaggcgccggtcgccggcatgggcgaccgcattctcgcgaagatcttcgccgcgaccgatcgcggcggtccggcctatacggcccgcatcatcaagatcctcgacaagcgccgcggcgcgctgctcggcgtcttcaaggatgcgcccggtggcggcgggcggctgttgccgatcgagcggcgcggcgaggaaatgctgatcgaccccgatgacaagggcgacgccaaggacggcgacctggtcgaggtcgaagtcgcgcgcctgcgcagcttcgggctgccgcgcgccaaggttctttcggtcgtcggctcggtcgcttcggaaaaagcgatatcgatgatcgccatccacgctcatggcatcccctatatcttcccgccggccgtggttgccgaggcggatgacgccaggcccgcgaccatgtcgcaccgcgaggactggcgcgacgtgccgctcatcaccatcgacccggccgatgccaaggaccatgacgacgccgtctatgccgagcacgacccctcgcccgacaatgaaggcggcgtgatcgtcaccgtggcgatcgccgatgtctcctactatgtccgcccgaactcgccgctcgaccgcgaggcgctgaagcgcggcaattccgtctacttccccgaccgcgtcgtgccgatgctgccggagcggatttcgaacgatctctgctcgctgcgcgagggacaggaccgcccggcgctggccgtgcgcatgaccttctcgaaggaaggccgcaaggcggggcataccttccatcgcgtgatgatgaagagcgccgccaagctctcctaccagcaggcgcaggccgcgatcgacggcaatcccgacgataaggccggaccgctgctggaaccgatcctgaagccgctgtggcatgcctacgaggtgatgaaacgcggccgcgaccgccggcagccgctggaactcgacatgcccgagcgcaagatccagctgaagcccgacggtaccgtcgatcgcgtcgtcgtgccgccgcgcctcgatgcgcacaagctcatcgaagagatgatgatccaggccaacgtcgcggccgccgagacgctggaaaagaagaagcagccgctgatctatcgcgtgcatgacggcccgtcgctctccaagcaggaaatcctgcgcgagttcctggcgacgctcggcatttcgctcgccaagggcggcaacatgcgcgccaacaacttcaacggcatcctcgccaaggccgaggacacgccgcaccagacgatggtcaacgagatggttctgcgctcgcagagccaggcgatctacagccccgagaatatcgggcacttcggcctgaacctgatgaagtacgcacacttcacctcgccgatccgccgctatgccgacctgatcgtgcatcgcgcgctcgtcggctccctcggtttcggcgaaggcgggatcacgcccgacgaggaagcggctctagacgatatcgcggccgagatctccaccttcgagcgtcgcgccatggccgccgaacgcgagacggtcgaccgcctcatcgcccaccacctcgcaggccgcatcggcgaggaattcgacgggcgcgtgggaggtgtgacgaaatcgggactatttgtcgctcttccggactatggagcggacggtttcattcctatatctacgctgggaatggactacttcatctatgatgaggcacaccaggcgctgtcgggcgaaaagaccggtctcggttaccgcctgggggacagcgtcagggtcaagctggtggaagcaattccgctcgccggagcgcttcggttcgagatggtgagcgaggggcgcaagatgcccaccgcggtacgttcattccacaagggcggccgacgcgacgcaagccgcgcgcgcaagcaggccggaacaagacccccgcgagggcgtcggtagggcgtgtagggacgccgggaaggaagtgcagtcatgacgaccacctcagacagccaggcgatccaatacggcgacatcgacgcaaccaagcgtccgctcggtcaatcgatcaagcgcggccttctcggtcgctgtccggcttgtggcagcggcaagctgtttcgggccttcctgaaaccggtggacaactgcgcggcctgtggcgaagccatgcaccaccatcgcgctgacgatctgccgccctacatcaccatcgtcatcgtcggccacgtgatcattggcggctacatgatgaccgatctcgtatggccgatgccgctctggctcaccttcaccatctggacgccgctgacgctgctcgcgacgctcctgatcatccagccggtcaagggcggggtcatcggactgcaatgggcgctgaagatgcatggcttcgggggccacggcgacgagcatgaccagtatgaaatccctggtcggcgtcaccaaggctgaagactttccttgaaccttcaccgtcacgacataattggcgtgtagcagcgccggatatgtcgtggagtccgtttgaagcacgatatcaacgcgcgcaatggtaggcttatttgactgaatctcgtccaccgcaatcagatcattgcagccaacctcgttcatctagtaaagcacacccgtcatctgggtctggcctgtcatataaggctggtatgaccatgggggcacgtgcggctttcaggtcgcattcgtgcgcagcagttctgtaggggtgcatatatgtctcagccgcgaaacggcacaccgggcgatctcgaggaaatccattggccgtctctggtcgccgccgtttgctcgatctcggcggtcggcatagcgatcgggttgggattgccgttgctcagcatcatcctggagaagcgcggcgtctcctcgacgctgatcggcctcaacacggcgatggcgggtgtggcggcgatggtggccgcgccgatcacgacaaagctcgcccattcctatggcgtggcccagacgatgctctgggcggtggtggtctcggcgctcagcggcgtcagcttctactatgcgcaggacttctggatgtggtttccgctgcgcttcgcctttcatggcgccacgaccaccctgttcattctttccgagttctggatcaacgccgcggcgccaccatccaaacgcggcttcgtgctcggcatctattcgacagtgctttcggtcggcttcgcggccggcccgctgctcttttccgtgctcggcagtgacggcgtcctccccttcgtggtcgccgccgtcgccattctgatggcggccgtgccgatcttcatcgcgcgcaatgagagccccgtgctggaggagaagccggaactgcatttcatgcgctacgtattcctagtgcccagcgccaccgccgccgtcttcattttcggcgcggtggaagcaggcgggctggcgctgtttccgatctacgcggtgcgcgccgcctttaccgagacgcaggcggctcttctgctgaccgtgatgggcgttggcaacatgatcttccagatcccgctgggcatgctgtccgacaagatgaacgacaagaggcctttgctggcggccatggccttcatgggcctgatcggctcgctgatgctgcccgtgctgtcccacagctggttcctgatggcgttcgtgctgctcttctggggcggctgcgtggcgggcctctatacggtcggattgagccatctcggctcgcgcctgaccggttccgatcttgccgccgccaacgccgccttcgtgttctgttacgccgtcggcaccgttgcgggtccgcaagtcatcggcgcggccatcgacgtcgccggaaacaacggctttgcctgggcgattgctggtttctttggagtttatgccctgctttcggcgggcagactgcttttcattcgaaagcggggttgacttttcgagctagattcgtagtttcgcgccagaattagccaaggcacctatacggattccgacggctttcatttcattaaaggcaggacgaccatggccaaggctacaacaatcaagatcaagctgctgtcgacagccgacacaggttccttctacgtcacgacgaagaacagccgtacgatgacggacaagatgacgaagaccaagtacgacccgattgctcgcaagcacgtcgagttcaaggaaaccaagatcaagtaatttcttgatcctgtagaccgcttaaaagcgcgcgccgccaggctgcgcgcttttttgttgcccgcgttacgcgccgctgccggcgacatgcgaaagcgacaaatgaaaacgccgccctgcccgtttaaacggagaggacggcgttttgcgaaagggggtcggtcaacaggcaacgcggcacgaggaaccgcagatgttgcatgccgaccgaccgaccccacgacccaggagatgcggcggacctgagcatcatggggtatcggcgcaccccgtatagggagtgctttatttctatgtattgatcatttgcgcgaaactgaaagaaaatcaacaaattcttaatgatgagatttattagcttgattttatggttaaaagtcccgatttgggacgccgtttcgcatgattttggaccatcttgcgctagaataatatccggcagcaagaatagacagacaatatagggcagtagtcctccccttcgcgaaccggcgaaacagcctgtaaatcagcgaaatccgccgacgaaaccaagcaaagtgacggaacctcacattttcttctgacgccgcccgcgtcttttctgatgcaaagcagcctcggcgggcggcaccaagctcaaaaccccgcactactacttgcggctaatcggcgagcgcggcccaaaccgcctccattcaactttctgtggatgatcaacgcggtatgagccgacacgcgggatcaggccgcggcgacgactcggttgcggcccgcgttcttggcttcgtagagcgcgacatcggcctgcttcagcagatggccaggtgtgatgacctgcggcgtgcgggaggcgataccgaaggatgccgtcacctgcagctcctcacccgtgcccttcaccacgaagggtacgctttctatgacgccacgcaggcgctcggccacggacgcggcgatctccggcgaggtgtcgggcatgacgacgacgaattcctcgccaccgtagcggcaggccaaatcggcgccgcgaaccgtggagcggacgcggttggcgaactcgcgcagaatatcgtcgccggcatcgtggccgtgggtgtcgttgatctgcttgaagcggtcgatatcggcgatcagcaccgacaacggacgaccgcgcgccatcgagcggttgaagagcgtgctgatgtgattgtcgagatagcgacggttgctcaagcccgtcaatggatcggtgaccgcaagctctatcgtctgctgcatattggcgcgcaggcgatcattgtagttcttgcggcggatctgcgtcaggctgcgggccaccagctcgttcggatcgacggggcggacgatgtagtcgttgacgccgagatcgagcgcacgcaccaccatctcgtcatcgccctgctcggtgatgatcaggagcggcaggaaacgggtacgctccagcgagcggagctgcgagcaaagcctgagcggatcgtaatcgtcgatattggaattgacgatcaccaggtcgaactgattctcggatgcctcgaacacggcggcctgggcatcggaaatggcgaagacgttgccgatcggcttcagcgccttgatgatccgctcctgcgaattggcacggccatcgaccagcatgatctggccgccctcctcgccgcgctgatcggcgcgcagtaattcgtcgatgcccatcgtgtgcgccgtctgggcgcgaatgcgcaattcgtcgctcagcgtcttcagccgcaacaggctcttgacgcgcgcgatcagctgcaggtcgttgacgggcttggtcaggaaatcgtcggcgcccgccttcaggccacgcacacggtccgcaggctgatcgagcgcggtcaccatgacaacgggaatgtgagatgtcttagggttggatttcaaccgctcgcagacctcgaagccgtccatgcccggcatcatgatatcgagcaggatgagatcgacctgattgcgttcgcagatcgccagagcctgataaccatcggccgccgtcagcacgtcgaaatactcggcgatcagccgcgcttcgagcagcttcacgtttgccgggatatcatcaacgacgagaatgcgcgcggtcataagcttctttccgatctatcaggcgtcgcccaggtaggtcttgatcgtctcgatgaacttcggaacggagatcggcttggagacataggcctcgcagccgccctggcgaatacgctcctcgtcacccttcatcgcgaaggcggtgacggcgatgacgggaatgacgtggagttcgtcgtcctctttcagccacttggtgacttcgagcccggaaacctcgggcagctggatgtccatgaggatcagatcggggcgatgcttgcgggcaagatccagcgcctccataccgttgcgggtctggatggtcctgtagccggacgcttcgatgaggtcgcgaaagagcttcatgttgagctcgttatcctctacaatcatcacctgtttgggcatcgaacgcgatcctaagtccgtcatgaaaaccgtttcgccgtgcggatcaaagcccgcgagcgcaccggccgccatgaaaccgattgcggcacgctatcggtatttggttgaaaaataggtaatttaccgcaagaaatgcagagcaacttcaagacttcaaagcaacgcgccgccgatccgcaagagacggccatcgctgttctcgcgtggctggcaaacgaacccgatctgttcggccgcttcctggcgctgaccggcgtcgagccggcgcaggtgcgcaacgcgatcaatgatccggggtttctctcaggcatgatggacttcctgatgcagcacgaaccgacggcgctggcgttttgccaggcaaccggcacgccgccggaggtgctgaatgcggcctggcagcatttttcgccggccggcctcggctcgggcgaatactgatcatgagcgtggtcaccgacccctctcaggttcgcctcggtgatcggccgctgatcgtctgcgacatcgacgaggtggtgctggagtttctcacacccctcacccgtttccttcgctcgcacgattacgatctgctgccacgctccttccggctgcacggcaatatcgtgtcgcttctcgacggcgcggaaatggatcgggacgcattcgaccgctttcacgagatgttcttcgagacccaggacctgtggcaggagccggcggagcgggcggtcgagacgctgcatgcgctggccgccgatgccgacatcgtctttctcaccgccatgccgccgcgtcaccacgacatccgccgcaggcttctcgaccggttcgacctgtgcttcgacatgatcgcctcggaacagcccaaggggccgatcgtggcggcgctgcacgaccgccgggagctgcccgtcgcctttatcgacgatatccaacgcaacctcctttccgttgccgaccatgtgccggactgcctgctgctcaacatgatggcgaatgccgatttcaagccattcgcgccaccgcctaccgggacgatcgtacaagcttccgactggacgcatgccgcccagctgatgcggcaacatttctcgaccgcgacgacgctggacaaaaccagcgcataagcgccgacatcctcttgagactctcgaacttagagcgtagtgtcgcgatgttcaacctttgttcccatcgatgaccgccaaccctgccaagacaccgggcttctgtcgcgactgccttgccgagcagaaggccgaggggcgacgctgtgcggcctgcggcagccctcgccttgtgcgccacgacgagctctacggcctgacgctggcgcatatcgactgcgatgccttctatgcctcggtggagaagcgcgacaatcccgaacttgccgacaaacccgtgatcatcggcgggggaaaacgcggcgtggtatcgacggcctgctatgtggcgcggatctatggcgtgcgctcggccatgccgatgttcaaggcgctggaggcctgcccgcaggccgtggtgatccctccagacatggagaaatacgtcaaggtcggccgcgaggtgcgggcgatgatgcaggaactgacacccttggtgcagccgctgtcgatcgacgaggcgtttctggaactcggcggcactgagcggctgcacaacgacccgccggcgcgcacgctggcaaagttcgcccgccgcgtcgagaaggagatcggcatcacggtttcgatcgggctctcctactgcaagttcctggcgaaggtggcctccgacctgcagaagccgcgcggattctcggttatcggccgcgaggaagcggtttcgtttctggcgccgcgtccggtgacgacgatctggggcgtgggaaaggccttcgccgcgacgctggaagccgacggcatccgcaccatcggccagttgcagaccatggacgaaaccgatctgatgcgccgttacggcacaatgggacaacggctttcgcggctgtcacgcggcattgacgaccgcgacgtgcatctcaacgatcccgccaagagcgtttcggccgagacgaccttcttcgatgacatttcccgatatgacgagctcgttcccgtgctgcgcaacctctccgagaaggtcgcgtggcgtcttaagaagagcgatatcgccggccagaccgtcgtcctgaagatgaagacagcggacttcaagtcgcggacgcgcaaccggaagctggaggatccaacgcagcttgccgaccgtatcttccgcaccggcatcgaactgcttcggaaagaaaccgatggaaccaagttccggttgatcggcatcggcgtgaccgatctctgcgaccccacgcgtgccgatccgcccgacctgatcgacgtccagtccgggcgacgtgcagcggccgaggcggccatggacaagctgcgcgacaagttcggcaagggcacggtcgagaccggctacacgttcggaaccaagcgcaaccaatagcaagccctgcccggcaccgcgcatttcaagtcttccttaagtttcaagcattacgctccgacgcatagtattgcgtatcggttgggttcaaatgttctcgcgtctcgtcttcgggctcggcttgctgtcggccaccgccctggtgcatcccgccttcgccaccgatgcgagggcgctgcagatcttcgtttccaagagcaagcagtcgatggccgtctatgacggcgccgatgtcatcgccacgtcgaagatatcgagcggcaaggccggccacacgacgccgagcggcatcttctcggtgatcgagaagcagacctatcacgagtccaacatctattcgggcgcgccgatgccgctgatgcagcggctgacatggtcgggcatcgcgctgcaccagtcgaactcggtgccgcgttatcccgcctcgcacggctgcgtgcgcatgcccgacgcattcgcaaagcagctcttcaagatgaccgagatgggcgtgccggtgatcatcaccgacggacagctcgcgccggagccgatcgatcacccgatgctgtttcgcccgcaagcgccggctccggcgccgcttttatcggatgtcgagctcaggcctggtatcggcgaactgccggtgcaggtggcgatgaacgaggtggcgatgccgcgcctgcaggtgcagccgatcgcggcgcccgcaaacgaccagccggtgaagatcctgatcacgcgccgctcgcagcgcgagacgatcatcgatctccagacctatctcgccgaactcggatttgccgtcggcaatgccgacggctatctcggcccggcgacggtgcaggcgatcggcgaattcaagaagcagcatccccttgcctccacccaagccaggtcacttgtcagtgacgacctcgtgcgcgcggtctataccgccgccggcaagggcgagccgccgaacggcgtgatcatggtgcgtcagggtttccggccggtgttcgaagcgccggtgacgatcgccgaaccggaactggcgctcggcacccatttcttcagcgcgagcgaggtgaacctcaaggacggcacgaccgagtggttgggcgtgacgctgcccaacacgttgaccagccagacgatgaaacggctgggcatcagcaccatggaaagctccgtcatatcgggcacgccgatcctgaacgcgcttggccgcatcaccattcccgatgacacgagacagcggatcgacgccatgctgacgccgggatcgacgctgacgatctccgacaccggcgtcggtccggagaccggtcagggtaccgacttcatcacgctcacgcgcggctagaccagctcgacgtcgatcacgcccggcgccgagcgcatggcggcggcgatctcgggcgtgatccggtatttctgcgccagctccacctcgatctcgcgcttgccatcctccttgatgacgatgaaggagacgagaccgtcgcctctcgcgttgagatgggcggcaacggcgcgcagagggccggaatcgcgcacatagacacgcaacgccttctgcatctgcagggacttttcctccagcgactggatcgtctggatgcgaaggccgatgccttcgggccgctcctcgccggtggcggtgatgacgaaggattttcccgactccagcatgtcgcgatactggttcagcatttccgagaagagtacggcttcgaactggccggatgaatccgaaaagacgacgatgcccatcttgttgccggtgcgcgtcttgcgctcctgcttggagatgacggttccggccagacgcgcattgctggcgccctgcttcacggcggccgcgaaatcgccgaaggtctggacgcgcatcttctccagcacgctactatagctgtcgagcggatgggccgtcagatagaagccaaggacctggaattccttgagcaggcgctcggagggcagccatggcgagaaaggcggcatcgagattttttccgggcccgcgcccgacgacgcgccgaagaaccccatctgaccactggttttctcttgctgggcattttgggcatagcccatgatgcgatctatgccgcccgagagctgggcgcgatcgagatcgaagcaatcgaaggcgccggcgaagatcaggctttccagcacgcgccggttcacctgcttcggatcgatgcgcaggcagaaatcctcgaggctggcgaatggcgtgtcgccgcgcacctcgacgatgtgatcgacggccgattcgccgacccccttcagcgccgccagcgcgtagtagatacggttgtcaccggtctggaagtggcggaacgaggtctgcacggagggcgcgatcacctcgataccgaggcgcttggcgtcctggcggaagtcgttgaccttttcggtgttcgacatatcgagcgtcatcgaggcggcgaggaactcgaccggataatgcgccttcatgtaggccgtctggtaggaaacgatggcgtaggctgcggcgtgcgatttgttgaagccgtagttggcgaatttcgccagaagctcgaagatattgtctgcctgcggcttcgacacgccgttcttgacggcgccgacgacgaagcgctcgcgctgctggtccatctccgccttgatcttcttgcccatggcgcggcgcagaagatcggcctcgccgagcgaatagcccgacagtacctgagcgatctgcatgacctgctcctggtagacgatcacgccctgcgtttccttcagcaggtaatcgatggtcgggtggatcgattcgagctcttcctcgccatgcttgcgggcgttgtaggtcgggatgttctccatgggacccggacgataaagcgccacgagcgcgatgatgtcctcgatgcagtccggccgcatgccgatcagcgccttgcgcatgccggcgctttccacctggaacacgccgaccgtttcgccgcgcgagagcatctcgtaggtcagcttgtcatccagcgggatcgcggcgaggtcgaccttgatgccgcgcttggccacgaaatcgacggcgaccttcagcgtcgtcagcgtcttcaggccgaggaagtcgaacttgaccagaccggcctgctcgacccacttcatgttgaactgggtgaccggcatgtcggagcgcggatcgcggtacatcggcaccagtttcgacagcgggcggtcgccgatgacgataccggcggcgtgggtcgaagcgtggcggtagaggccctcgatcttctgcgcgatatcgagcaggcgggcgacgacgggctccttgtcggcctcttcctgcagcttcggctcctcctcgatcgccttcgacagcggcgtcggattggccggattgttgggcaccagcttgcagatcttgtcgacctgtccgtagggcatttcgagcacgcggccgacgtcgcgaagggcggcgcgcgcctgcagcgaaccgaaggtgatgatctgcgccacctgctcgcggccgtacttcttctgcacgtagcggatcacctcttcgcggcgatcctggcagaagtcgatatcgaagtcgggcatcgagacgcgttccggattgaggaagcgttcgaagagcagcgagaagcgcagcggatcgacgtcggtgatcgtcagcgcgtaggcgaccagcgagcccgcgccggaaccacgaccggggccgacgggaatatcctgcatcttcgcccacttgatgaagtcggcaacgatcaggaagtagcccgggaatttcatgcgctcgatgacgctgagctcgaactccaggcggtcgcggtaatccttctcctcgtagcccggcgacatgccgagcgttgcgaggcgcatgtcgagaccttcgaccgcctggcggcgaagctccagcgattcggcacgctccgcctcctcggggtctgccgtggcgccggtgaagcgcggcaggatcggcttgcgggtcttcaggacgaaggagcagcggcgggcgatctccaccgtgttctcaagcgcctcgggcaaatcggcgaagagcttcaccatctcggcgcggcttttcagatagtgatccggcgtcaggcgaaaccgcgtgtcgtcggagacgatggcattgtgcgccacggccatcagcgcgtcgtgcgcgtcgtaatcgtcgcgggtcgggaagaaggcctcgttggtcgcgaccagcgggatctcgtgctcataagcaaggccgatcacccgctgctcatggcgcttgtcataggtgccctggcgctgaagctccatgtagagccggtcgccgaacttgtccttgagcgatagcaaccgcgcggtcgccggcgcgatgtggccctctttcagcggcatgtcgatcgggccagtcgatgcgcctgacagcgcgatcaagccctcggtgccaagttcgtccagccaggaggccttgatgtggaccgcctgcccggcgccctcgccgccgagataggcacggctgaccagatccaccagccgctcatagccggcatcgctagccgacaggagcacgatggaaggcagcttcgccagttgctgctggccgcccctacggtccgtctcaaggccgtcttccatgtcgatcgagacctggcagccgatgatcggctgcaggccctcgtccatcgacttctgcgcgaattcaagcgcgacgaacaggttgttggtgtcggtgatggcgatggccggctggctatcgcccgatgccttgtagagaatcttcttgagcggcagcgcgccttcgagcagcgagaaggcggaatgcacacgcaggtgaacgaagcccggcgtaccgccgatgaagtcgctcgcgccattttccgtgcccgccatgctatgcctttccgcgcatcctgatgaatcggctgcattgtcggatttggggaggacgatgtccagagaggcgggcgcgaacggaccgcatgacagccatgcggtccccgttattcttagattgccatgcagatcaaagagaagctcgcaatgaacattgcgatggaggtgaatgctgcgatatcgcggatcatatcagtcatttggctctcctgtgctgttatgtttctaatttgttccgctattgttctattgtcaacaggattcttttccgctttcctgctcgcgcagctccggagaaaagcatgtttaaatttgtcttaattcttgcgctcacatccagcgccaactctgcctgggcagatcagatcgaacccgccgcgatcatcgcggccgcgaccggcgattggaacggcgacggcggcagcgatcttgcgcttctggtcgcgccgccggaaccgagcaacgacgtcgggatctatctttacctgcgggacaagaaccacgccctgcagcgcctcgtcaccatggcgccgggcaagatctggggaaataccaggctggacggcatgctcgggcaggatccctcgatcgaggcccgtccgggcggatcgatcgcggtcagttcacaaaattcggctatcgggcgcagccggtgggaacagacgctgacgatcgcctatcgcgacgaacagttcgtcgtcgccggctacacctacagctattacgacacgctcgacacggacgataccggccagtgcgactacaacatcctgacgggcaaggtgatggcgaaaggcaaggcatcaacggtcgagccgaagacgatcgcggtcggcgattggcaggacgaggtcggacagaaggcgtgcgggttcaccgagtgaaacgacagcgatagggatggccgatgatttctccaccgccgatcgcggtcaaaaatccacgaccttgccgtcggcgatggtgacgcggcggtccatgcgggccgccagctcgtggttgtgagtagcgatcagcgccgcgaggccggattgacgcaccaatgcctccaaggcttcgaagacatagctcgccgtctcgggatcgaggttgccggtcggttcgtcggcaagcaggaggctcggcgcgttggcgacggcgcgggcgatcgccacgcgctgctgctcaccacccgacagttcgccgggacgatgggcgccacggtggccgatgcgcatgtagtcgagcagctgccctgcccgcacctttgcttcgctgcgcggcagccccgatatcatctgcggcatcatgatgttttcgagcgccgagaattcgggaagcaggtggtggaactggtagacgaagccgatctcgccgcggcggatcgccgtacgcttgtcgtccgacaggccgttgcaggcatggccgccgatgtggacctcgccgccatcgggatgttcgagcaggccggccagatgcagcaaggtcgacttgcccgtgcccgacggggcgacgagggcgacgatctcaccgctgttcagcgtcagatcggccttcttcaggatcgaaaggcgggtatctccctggccatagtgacgctccacgccggaaagcttgagaacggtattccgcttcatgaaatcagcattccttattcgtagcgcagggcctgcacgggatcgagctttgaagcacgccatgccggaaagattgtcgcgaagaaagacagcgtcagcgccatgacgataacggagaccgtttcgccgaactccatcttggccggcaattggctgaggaaatagagctgcgggtcaaacagcaccgttcccgacagccaggagaagaacgcgcggatcgattcgatgttggcacagacgataacgccgagcagcacgccggcgaaggtgccgaccaggccgatggcggccccggtcatgaagaatattcgcatgatcgagcccgaggtcgcgcccatggttctcaggatcgcgatatcgctgcccttgtccttcaccagcatgatcaggccggaaattatgttcagcgcggcgacgaggacgatcagcgtcaggatcatgaacatcacgttgcgctcgacctgcagcgccgagaagaaggtctgattgcgctggcgccaatcggtgatggcgatctgccggccggccgcctgctccaccttggggcgaagctcatcgacactttcgggattgtcggcaaagagctcgatcgactgcaccagcccctcggcgttgaaatagagctgcgcttcctcgagcggcatatagatgatcgtcgcgtcatattccgacatgccgatctcgaagatccccgagaccttgtaggacttgacgcgcgggttgatgcccatcggcgtcacgtcaccttcgggcgatatcagggtaatgctatcacccgcctgcaagccgagctgatcggccatgcgcgaaccgatcagaaccccctggttcgcggcaaagccgaccaggtcaccggacttgatgttgtcggagatggttttcaccttgcccaggtcttcagcgcgaatgccgcgaaccagagcgccggtaccggcaccgccggcgccggacgccagcgtctgcccttcgaccagcggcagtgccaccttgatgccgggcacggcgcccaggcgatcggtcagagccgcgtaatcggtgaagggaccatcgaccggctgcacgatcatgtggccgttgatgccgagaatgcgcgagatcagctcggtgcggaaaccgttcatgacggccatgacgatgatcagcgtcgcgacgccgagcatgatgccgatgaaggagaagccggcgatcaccgagatgaaggcttccttgcggcgcgcgcgcagatagcgccacgcgacaagtcgctcgaaagcggaaaatggcctgctggccgcagccgagccggatttggatccctgctggctcaccgctgcgtccgccatttcgcctcccgccttcttcttagcccaagagcttattgattgccgcatcgatggtcatcgtttcgcgggcaccggtcttgcggtccttgacttcaacttcgccgttcgcgaccgcgcgcgggccggcgatgatctgcacgggaacgccgatcaggtccgcggtcgcgaacttggtgccggcgcgatcgtcggtgtcgtcataaagaacatcgacgccagccttggagagctctgcgtaaatcttctcgcaggcggcgtcgcacgcggcgtcaccggccttcatgttgatcacgacgacatcgaaaggcgcgacggaggccggccagatgattccgttctcgtcatgcgatgcttcgatgatggcgggaacaaggcgggtcgggccaataccgtaggatcccatgtggacggcgtgttccttgccatcggggccctgcaccttcgcgcccatcggctcggaatatttcgtgccgaagtagaagatatggccgacctcaattccgcgcgccgaaaggcgatcgccctcggggatggcggcgaaggcggcttcgtcgtgcatctcggacgtggcggcgtagaccgaggtccacttcttgaagatcgtgtccagaccggccacatcgtcgaagttggtgtcgaccgacgggatatcgaaattcacgaagtccttgtggctatagacttccgattcaccggtgtcggcgaggatgatgaactcgtggctgagatcgccgccgatcgggccggtgtcggcgcgcatggggatggcgcgcaggccgagacgatcgaaagtgcgcaggtaagccgcgaacatcttcttgtaggagtgctcggcgccttcgcgggtcatgtcgaaggaataggcatccttcatcatgaactcgcgcgagcgcatggtgccgaagcgcggacggatctcgtcgcggaacttcagctggatgtgatagaggttcagcggcaagtccttgtaggacttgaccgaagaccggaagatatcggtgaccatctcttcgttggtcgggccgtacagcatcgggcgatcctggcggtccttgatgcgcagcatctccttgccgtaggcgtcgtaacgtccactttcctgccagagttcggccgactgcagggtcggcatcgacagctcgatggcgccggcgcgattctgctcctcgcggatgatgttgttgaccttgtctagcacgcgcttgcccagcgggagccacgagtagatcccctgcgactgctggcggatcatgccggcacgcagcatcaaccggtgggagacgatttcagcctccttggggttttccttgaggatgggcatgaagtagcgagacagacgcatggcgaattccagagctgttgagacgccgcctgatagcggaatcgaaggcaatcacaatgttggctgcgttcataaccgcttcgcggcttgaaggaaacccgcgagggctgtccacaggcttctcttagagcaagttcgagcccgcaaatcgaagaaagtaagaaaaaggcgaaattataatgacttgcgcgaaattcttatcaacagaaaaaatttactcgagtgtagcaaaaatgcaaaaaaatctgatgacaaagcacaatctttgagctagctttagcccacaaaacaggcagggagttcaaatccctaccaatttcgcggtcaagtcttgggaggatcagatcttaggcgcgcttgtcgcagccccggtaacggttaaggatcacgcgatacttaaaacaaggcttttagccttgtttttttttggcttttcgagatcacgccgcgttccgaaagcacctgtcttccgcaacgtaatgcgctctttccgttacggcacctccatgccgcaacttgatgacatgcgtatgacggcctcgccagcgcatctgcccaatcactgggcaaacgccctcagacgcgcgaaaacgatgggccgatctgcggaagagcgtccaggttccagccgaaataggtcgaagcgacgtaccagagaccgtaaatgatggcggagaccagcgtcgtcagggagaaggtgaagagcgggcggaaacgggcgggcgcgctatgtacggtaccgagcacgatatcctcgttctcagcctgcgtacgcaagccgatcggcaacacggcgaagagggtcatccaccatacgatgaagtagaccgcgaagccctgtagaaatgtctgcagcataaaacctcccacccaagcggcagcaacacggccaccgcccttataagcctgaacggtcgcgatacaaagcgacgttgacgcagttgcgcgatctcggtggcgcttgggtcactccgttgcagcaggttcagacctgctcgagctcgatcagcgtgccgaagaagtccttcggatgcaggaagagcacgggcttgccgtgcgcgccggtcttcggctcgccatttccgagcaccctcgccccggcggccatcatctggtcgcgagcggcgatgatatcgctcacctcgtagcaaatgtggtgcatgccgccggatgggttcttctccaggaaggccgctataggagattgcggaccgagcggctcgagcagttcgaccttggtattcggcaactcgacgaagacaacggtcacgccatgctccggcaatgcctcggccgccgacaccacggcgccgagcgtgtcccgataggcggccgtcgcggcggcgagatcggggacggcaagggcgacgtgattgacgcggccgagcatcggtcagaccttggtgacgaagacggtgaccagcggcttcttgccccagatctggttggcggtcgaacgaaccgcgcgacgcatcgattcctgcaacagatccagatccttgcggcgcgcgcgcggaatgctctcgaaggcgctgagagcggcgtcgtagagcgtgtcctcgaactcgtcgccctcgtcgtcgtagatgggcaggccgatcgccaccatgtcgggttcgccgatgatgtcgaagcggctgtcgatcaccacgttcagcgcgacgtgaccgacgtaggagagcttcttgcgctcgccgatccccatctcgtcgaaatcgccgatcagcgcgccgtccttgaagatgcggccatgcggggcctcgtcgatgacctccaccggaccgggcgccagacgcaggatatcgccgttgcgcacacgcggaacgatcgagataccggattgctcggcgagcaccttgtgggctgtcagatgcgtggcctcgccatgcacgggaactacgatggccggccgcgtcagctcgtacatcttctgcaattcgttacggcgcgggtggccggaaacgtgaacgagcgcttcgctatcggtgacgatgtgaacgccctgctcgacgagcccgttcttgatgtcctgaatggccttctcattgccgggaatggcgcgcgaggaaaagaccaccgtatcgccggccgtcagcgcgacattgcgcatctcgtcgcgcgagagcttggcaagggctgcgcgcggctcgccctggctgccggtcaggatcaccacgacgttctcacgcgggatgtagccatactcctcctcggcgatgaacggcttgatgccatccagcaaaccgagttcgcgggagacgttgacgacccgcttcagtgaactgccgagcagcaggacttcgcgtccggcggcttcggcagcttcggcgacggtgcgaatacggccgacattcgaggagaaggtggtgatcgcgacacgaccctcggcattctcgatgatcttgcgcaggcttgctgaaacgtccttctccgacggcgagacgccgtcgcgcagcgcgttggtcgaatcgcacatcagcgccagcacgccttcgtcgccgagctggcggaagcgtgtctcgtcggtcaacggaccgagcgacggctcgtgatcgatcttccagtcgccggtgtggatgacattgccggccggagtacggatcaccaacgacatcggttcggggatcgagtgattgacggccacaccctcgacgctgaaggggccgacattgaccacggtgcccgctgtgaacggcgtgatcgggatttcgaccatcgtcgacttctcgtagttgcgcttggcttcaagaagccccgccgtgaagcccgatgcatagacgggaacattgaggcccggccacagatcggccagcgcgccatagtgatcctcatgcgcgtgggtgatgaagatcgccttcaggttcttgcgttccttggcgaggaagcgaatatcggggagaaccagatcgacacccggcagatccggacccgggaaggtgacgccgcagtcgaccatgatccactggcgatgggcggacgggccatagccgtaaagggcgagattcataccgatctcgccaacgccgcccaaaggcagaaataccagttcgtcctgcttcgccatgctgcttgtttttccaatcatccaaagaagacgtcgccggcggcgatcgtcatcatcctgcctgcccccgtatcgagcagcaacaggccattatcatcaattccggtgaagtggccggaaatcgaacgatccggcaggttcacggttatcttttcaccaataccgcaggcgacctggcgccaacgggcggttatatcgcgaacgccccggccgcggtcccacgctgatagcacatcggccatggatgcgaacagatgggcgaagagttcctgcgcggaggcggaacttccctgttcctgcaggcaggtgacggggtagagcggattgtccggcatgaaggcgacattgatgccgatgccgatgacgagcgcatagcggccatccggcaaggtctcgccttccatcaggataccgcatgtcttcttgcggccgatcaggatgtcgttcggccacttgacctcgagcggctcggcgctcgcgggcagcaccattcgcaccgcttcgtgcaccgcgacagcgatcgccagcggcagcgacgaaatgcgctccatcggcgctggatcgatcagaagcagggaggcgtagagattgccggggtccgatacccaaggacgaccgcggcggccgcggccgccggtctgtctttccgcggtcacccagagacaaccggtgtcccctgccctggcacgggcaaggcattcgctattggtggacaacgtctccgacagagcctcgtgcctgaagtcgtcgagcgacttcaggcgccgtgggtcgaagctcatcagaacagcgtcgccgcagcgagctcggccgcaccaccgatcggaccgccgatgaggacataggcgagaacgaagaggccggaaacgccgaagacgaggcgcagcgagccggagacgcgggcgaattcgccggtggcttcatcgaaccacatcagcttgatgacgcgcaggtagtagtaagcgccgacaaccgatgcaagcacgccgatgatggcaagcgcatagagcttggcctcgatggcggcgacgaagacgaagtatttcccgaagaagcccgcaagcggcggaataccggccagcgagaacatcaggatggtgagcacggtcgccatcatcggattggtggtcgacaggcccgcgaggtcggctacgttttcgacaacggtgccatccttgcggcgcatcgacatgatgatcgcgaaggagcccagcgtcatgaccatgtagatcagcatgtagagcatgacgccggagacgcccgtctgcgagccggcggcaaggccgaccagtgcgtagcccatgtgaccgatcgacgaataggccatcagtcgcttgatgttcttctggccgatcgcggcaaacgagccgagcagcatcgaggcgatcgagatgaacacgacgacctgctgccagtccgccatgatgggctggaaggcgctgatgacgatacgcgtcatcatggccatcgcggcgatcttcggcgcgctggccaggaaggccgtgaccggggtcggcgcaccttcgtaaacgtcaggcgtccacatgtggaacggaacggccgagatcttgaaggcgatgcccgcgagaatgaagaccagaccgaagatcaggccgagcgaacgcgtaccctcgaccgtcagcgcctgcgcgatttcggcgaactgggtctggccggtgaatccgtaaaccagcgacatgccgtagagcagcatgcccgacgacagcgcgccaagcacgaaatacttcaggccggcttcggtggacttgacgctgtcgcggttgatcgcggcgatgacatagatcgccagggactgcagttccaggccgaggtagagcgcgatcaggtcgttggccgaaatcatcagcagaatgccgagcgtgcagagcacgatcagaaccggaaactcgaacttgtcgagctggttttccttggcgagaccgagcgacatgaacagcgccacgatcgagccgacgagcgccgtcaccttcatgaagcggccgaagccgtcagccaggaagacgccgccataggcaatgccctcgctcggagcgaagaccagccacagcgccgcgacggccagcaggatgatcgcgagaacgctgaccatgcggccggagcgctctcccgagaatacgccgaccatcagcaggaccagggcaccgatcgcgaggatcagttccggtatcgaaagatgcaggcttgcgagaagtgtttcagaggtcatatcacaaaagtcccgtcatcatttcatcgacagcgcgacatcacgcgctgcctggactgcggccgaatagctattgaccagctgatcgacggaggcagcggtcgcatcgaagaccggagccggatagacgccgaagaagatcgtcagagcaatcagcgggtagaggatcagctgctcacgcggcgtcaggtcgaggagagccttgagcttttccttctccagcgtgccgaagatcacccggcgatagagccagagcgcgtaagcggccgagaggatgacaccggtggcggcgaagagcgcaacccaggtgttgacccggaagacaccgatcagcgtcaggaattcgccgacgaaaccagaggtgccgggaagaccgacgttggccatggtgaagaccatcatcgcaaaggcatatttcggcatgttgttgacgaggccgccataggccgcgatctcacgcgtgtgggtccggtcgtaaatcacgccgacgcagaggaagagcgcgccggagacgagaccgtgcgacagcatcacgaagatcgcgccctgcacaccctgcgtgttggccgcgaagatgcccatggtcacgaagcccatgtgagcaaccgacgaataggcgatcagtttcttgatgtcgtcctgcatcagcgccaccagcgatgtgtagatgatggcgatgacggacagcgcgaagaccagaggcgcgaagaagtcggaggcgacggggaacatgccaagcgagaagcggatgagaccgtagccaccgagcttcagcagcacgcccgccaggatgacggaaccggccgtcggcgcctgaacgtgggcgtcgggaagccaggtgtggacgggccacatcggcatcttcaccgcgaaggaggcgaagaaggcaagccatagccaggtctgcatctgcggcgggaacttgtaggcaagcagcgccgaaatgtcggtcgtgccggcctgccagtacatcgccatgatggcgagcagcatcaggacggaaccgagcagcgtgtagaggaagaacttgtagctggcgtaaacgcgatccttgccgccccagacgccgatgatcaggaacatcgggataaggccggcttcgaagaagacgtagaagagaacgatatcgagcgacacgaagacgccgatcatcatcacttccagcaccaggaaggcgatcatgtattccttcaggcgcttctcgacggcaaaccagctggccagcacgcagaagggcatgaggaaggtcgacaggatgacgaacagcatcgagatgccgtcgacgccgacctgatagctgatacccgtgccgagccagctgtgcttctcgaccatctggaaacccgggttcgcgttgtcgaagccgatccagatgaagagcgagagaatgaaggtcgcgacggtcgtcaacagagtgatgttgaggacgttgcggcggccgttcgggccgtctccgttcatcagaagcaggagcaccacgccgacgaacggcaggaaggtgaccgtggaaagaataggccaatcggtcatcagagggcactcccgagcatcatccaggtaacgagcgccgcaacaccgatcagcatggcaaacgcgtagtgataaaggtaaccgctctgcaggcgcacgacgcggttggtgacatcgacgacgcgggcggcaatgccgttcgggccgtagttgtcgatgacgccgacgtcacccttcttccacaggaaccggccaagggcctttgacgaacggacgaagaggaagtcgtagagctcgtcgaagtaccacttgttcaagaggaactggtagagcacccgatgctggcgtgcgagcacggccggcgtcgatggcgacttgatgtacatgtaccaggcgatcacgaagccggtgaccatggcgatgaacgggctgaggataacaagagggggaacctcatgatacgcggtcagcatgtcgttgccttcagccgtgaagagcgcgcccttccagaactcggcatattcctcgccgtagaagtaaccttcgaagtaccagccggcaaagatcgcaccgagagccagcagataaagcggcacgagcatgacctgaggcgattcgtgcacgtgatgcatgacctcatgcgaagcgcgcggcttgttgaagaaggtgaggaacatcaggcgccaggagtagaagctcgtgaacagagccgcgatcaccagcatggcgaaggcgaaaccggcgaccggcgaattcgaagcgtaggctgcctcgatgatgacgtccttcgagaagaagccggcaaagccgaacgacgtgaagggaatgccgacgccggtaatggcgagcgtgccgatcagcatcatgacgaaggtgaccttgatgtgcggacgcagaccacccatgtgacgcatgtcctgctcgccatcgacggcatggatgaccgagccggcgcaaaggaagagcagcgccttgaagaaagcgtgcgtgaacaggtggaagatggccgcgccataggcgccgacgccgagagcgacgaacatgtagccgagctgcgagcaggtcgaataggcgatgacgcgcttgatatcgttctgcacgaggccgacggttgccgcgaagaaggcggtgatcgcaccaatgagggtaacgaccgtcagcgcatcgggcgacagttcgaacagcggcgacatgcgggcgacgaggaagacgccagcggtgaccatggtcgcggcatggatgagggccgacacgggcgtcgggccttccatggcgtccggcagccaggtgtgcagcaggaactgcgccgacttgcccatcgcgcccatgaacagcagcaggcaggcgccggtcagtgcctgagccttgttgagctgcatgccgaagagattgagaacgacgtcggtgccagcgccaccctccttggcgaagccggcggcgttcgcgaagatggtgtcgaagttgatggcgccgaagaggacgaagacgctcgcaatgccgagaatgaagccgaagtcgccgacgcggttgacgacgaaggccttcatcgccgcggcgttggccgacggcttcttgtaccagaagccgatcagcagataggatgccagacccacgccttcccagccgaagaacatctgggcaaggttgtcggacgtgatcagcatcaacatcgcgaaggtgaacagcgacagataggcgaagaaacgcgggcgatgcgggtcgtggtgcatgtacccgatcgagtagaggtgaacgagcgtcgaaacggagttgacgacgatcagcatgaccgaggtcagcgtgtcgatgcgcagcgaccaggagacgtcgatgccgccggactggatccagcgcaggacttcaaccttgatcgggccgccttcgacctcgcccatgcctacggtgatgaagacgtaccacgacagcaccgccgtgatgatcatcagaccggtcgtgaggtattccgatgccttggcgccgatcgcgcggccgaaaaggccggcgatgatcgcgccgatcaagggaagaaagacgatagccttatataaaaacatagccttatcagcccttcatcatattgacgtcttccacggcgatggagccgcggttgcggtagaagacgacgagaattgcaagaccgatggccgcttcagccgcggcgacggtcagaatgaacaatgcaaagacctggccgacgatgtcgttcaggaacgacgagaaggcgaccatgttgatgttgacggcgagcagaatgagctcgatcgacatcaggatgacgatgatgttcttccggttgaggaagatgccgaagacgccgagcgtgaagaggatggcgctgaccgtcaggtaatgggaaagtccgatgaccatagtgttgtttccttaagctcgcgcctgcctcaaagcccctgacccggcttcaccgagatcacctcgacggcggtcttcgggttgcgggcaacctggtttgcgatgttctgacgcttgaccgtcgtgcgatgcttgagcgtgagcacgatcgccccgatcatggccaccagcaggacgagagcggcgatttcaaagaagtagacataattcgtatagagcacgtcgccgagggcggcggtgttggtgcgctcggtgatcgcggggatcggcatcgccaccgtcttggcgatctccggcgagatcatgctgccgccgacgacgacgatcagctcggccgcgaggatcaatccgatcagcgcgccgatcggcgcgtattccagaacgcccgcacgcagctccgtgaagtcgatgtcgagcatcatgaccacgaagaggaagagaaccgccacggcgccgacataaacgacgagcaggatcatcgcgaggaattcagccccgagcagcaggaagagaccggccgcgttgaagaaaaccaggatcaggaacagaaccgagtgaaccgggttcttcgaccagatgaccatgaacgccgacgctatcgcgataaaggcgaaaatatagaaaaatagagcctgcagacccatgttcgtgccttcttcatcttcccacgggctgccgggggcttcccccgcccgatgaagcttcgcattggttgtcgcgaagctctggtgcatgttgactgggcgacgcttcaagcaccgcccggcatttcaatttcaatcaacggtacggagcgtcgagcgcgaggttgcgagcgatttcacgctcccaacggtcgccgttttcgaggagcttctgcttgtcgaaatagagctcttcgcgggtttccgtcgcaaattcgaaattcgggccttcgacgatcgcatcgaccgggcatgcctcctggcagaagccgcaatagatgcacttcaccatgtcgatatcgtaacggaccgtgcggcgggtgccatcgttgcggcgcggaccggcttcgatggtgatcgcctgagcaggacagatcgcctcgcacagcttgcaggcgatgcagcgctcttcaccgttcggataacggcgcaaagcatgttcgccacggaagcgcgggctgaccggtcccttttcgaacggatagttcaccgttgccttctgcttgaaaatgtagcggaacgtcagccagaacgcgctgacgaattccttcaggaacaacgagctgacagcgttggacaagcctgccatcttcaacctccaatattgctggaaaccacggccggcatgatcacgcccctgccgtcagcttcagcacgaatgcaacgatgatgaccatggcgagcgacagcggaaggaagaccttccagccgaggcgcatcagctggtcgtagcggtagcgcgggacgaatgccttgaccatcgcgaacatgaagaacaccaggcacgacttcagcatgaaccagacgatgccgggaacccagttgaggaaccagacgtcgaccggcggcagccagcccccgaggaacaggatcgtcgtcagcgagcacatcaggacgatggccgcgtattcgccgagcatgaacatcatgtagagggaggaaccatactcgaccatgaagccggcgacgagttcggattcagcttccggaaggtcgaagggcggacggttggtttcagccagtgccgagatgaagaagatgatgaacatcgggaacagtgcaagccaattccagtccaggaaggacgatggcaggccgacgcccgtaccgatgccactctgctgcgcatagacgatatccgtcagattgagcgaacccaccgtaagcaggacagtgacgatgacgaaaccgatcgaaacttcgtaggaaaccatctgcgccgccgagcgcagcgcgccaaggaacggatacttcgagttcgaggcccagccgcccatgatcacgccgtacacttcaagcgacgagatcgcgaaaatgtacaggatgccgacgttgatgttggcgatgacccatccatccgcgaagggaatgacagcccaggtcgagagcgccagcagcacggtgaccagcggcgccagaaggaagaccgccttgtcggcgccggccggaatgatcggctccttgaagacgaacttcaaaagatcggcgaaggactggaaaaggccgaagggacccaccacattcggtccacggcgcaactgtacggccgcccagatcttgcggtcggccaacagaatgtaggcgatgaagacgagcaagcagacgaggacgagaagcgactgaccgaccatgaggaggcctggccagacatatgttgaaagaaacgattccatagtcccctgcccttactctgccgcgactttgaagttgttgcgggccaatgccgagcactcggccatgacagccgatgcgcgcgcgattgggttcgtcaaatagaagtctttcaccggcgatgcaaagccggacttgttcattttgccggcttttttggccaccgctgcaattttggcgctgtcgctgtcggcaatctcgtcggcggccgcgaaatgcgggaacgcctggtagagcttggcgcgcagctggctcaacgaatcgaacggcaatttcttgccgagaacgtcggagagcgcgcggatgatcgcccaatcctcgcgggcatcgcccggagcaaagccggcgcgattgccgatctgcacgcggccctcggtgttgacccaggtgcccgacttttccgtgtaagcggcggccggcaggatgacgtcggcgttctgcgcgccctggtcgccatgcgaaccgatgtagacggtgaacttcgccttcttggcttcgaaattcatctcatcggcgccgagcaggaagagaacgtccatcgacgtcagcatttcagccgcatcgacacccttggcgcccggcacgaagccgagatcaagaccgcccacgcgggcggcagccgtgtgcagaacggcaaagccgttccagccatcgacgaccgcgccgacagtgccggcgagcttggcggcgctggcgagaacgccagtgccatcagcgcgtgcgagagcgccctggccgatgatgatcagcggcttcttggcatcggccagcaccttggcgaagctgtgcgtgccatcgaccagatccttcagcgtatccgggccggaaccgagatattcgtagtcgtaacgcagttcgccggcttcgccgatcacgccgatcgggaagttgccgcggcgccagcgcttgcggatgcgggcattgagaacggcggcttcgaagcgcgggttggcgccgatgatcagcagcgcgtcggcctgttcgatgccttcgatcgtcggattgaagatgtagcttgcgcggccgagcgacggatcgagtgccgtcccatcctggcgacagtcgaggttctcggaaccgagcgacttcaccagctcggacagggcgtacatctcttcgaccgaagcgaggtcgccggcgatggcgccgatcttgtcgccggaggtggaggccacggccgacttgatggcggcgaacgcgtccggccagcttgcgacctgcaggcgaccgtccttgcgaacataaggcttgtcgaggcgctgcgtcttcaggccgtcccagatgaagcggctcttgtcggagatccactcttcgttgatctggtcattgacgcgcggcatgacgcgcatgacttcgcggccacgggtgtcgacgcggatcgccgaaccgagcgcgtccatgacgtcgatcgtttcggtcttgttcagttcccacggacgggccgtgaaggcaaagggcttggaggtcagcgcgccgaccgggcacaggtcaacgacgttgccctgcagctcggaggtcatcgcctgctcgagataggtggtgatctcggcatcctcgccacgaccgatcaggccaagctcggcgatgccggcgacctcggtggtgaagcgaacgcagcgcgtgcagtgaatgcagcggttcataaccgtcttgacgagcggtccgatgtacttgtcctcgacggcgcgcttgtcttcctggtagcgcgagccggcgataccgaaggccatggcctggtcctgcaggtcgcactcgccaccttggtcgcagatcgggcaatccagcggatggttgatcagcaggaattccatcacgccttcgcgggccttcttgaccatcggcgtgttggtgaagacctcgggcagttcgccgttcgggccgccgcggatatcgcgcacgcccatggcgcaagatgcctgcggcttcggcgggccacccttgacctcgacgaggcacatgcggcagttgccggcaaccgaaaggcgctcgtggaagcagaagcgcggaacttcagcaccggcttcctcacacgcctgaatgagggtgtaatgatccgggacctcgatctcgttaccgtcaatcttcagttttgccatcgtcactcagtcctgtttcccgttcaccggatgccggcaaacaaacctattctgcaacgtttccactgccagggcggattttcgatcccgctgacaccggtgtcgtccaaattttcgtctccgccccccgaggcccgggaaccggcctgcgaccttcgcggcaccgggaccctccccgcgccgctcggccttgtctctcctccggtcgcgatccgcgaccggacatcatcacgtccgcttccggcccctcgccgtcagcgccttggcctgcgccacccagccatcgcgggcgatgcggccgtcgaagccgagttcggcgtcgaggcgggccacatcggcatccgaccaggcggcgatcaccgcgagcgtgcgaacgcccctggcgttcagcacctgctccagcttcgggccgatgccggagatctgcttcagatcatcggccttcctgccccgggccgccggcttgccggccgcggcaactttcgccttcgccgcaaccggctcggccgtgtcggacacgaccgccagctttacgcggccggctgcctttttcggcgcggccgggcgaatgttttccggcttcacgtcgatctcgggcttcggctcttccggcggcgtctcgtcgagaaccgccgccagcttgttcgatgcttccatcgctccctggagggcgccgaaaaaggcgccggccatttgcgtggagaagccgaaaccgatcgcggtcgcggcggccatagcggctgccggattgaccatcatcggcgcgatcggcaaggcgcgggcattttccagcatctcggcggcaagacggccgaagtccgccgagaaatcggcaaccccttccttgttcttgctgtcggatgcgtttgccatcgtcttactcagcagcctcgagaaccgcgccatgatccatggcgctcgccgtatattgatcaatccgcgcttcgatctcatgacggaagttacggatcagaccctgcaccggccatgcggcagcatcgccgagcgcacagatggtgtggccctcgatctgcttggtgacggcgaagagcatgtcgatttcgcgcttctgggcgttgcccttggccatgcgctccatgacgcgccacatccagccggtaccttcgcggcacggcgtgcactggccgcagctctcatgcttgaagaaggccgagatacgggcgatcgccttcacgacgtcggtggacttgtccatgacgatggcggcggccgtgccgaaggaagagccaacagcgcgcaggccgtcgaagtccatcgggcaatcgatgatgtccttggccggaacgatcgggcacgatgcgccgcccgggatgacggcgagcaggttgtcccaaccgccgcggataccgccggcgtgacggtcgaccagttcgcggaaggtgatgcccatttcttcctcgacggtgcacggcttgttgacgtgacccgacagcatgaacagcttggtaccgacattgttcggacggccgatcgacgagaaccagccggcgccgcgacgcaggatggtcggggcaacggcgatcgactcgacgttgttgacagtggtcgggcagccgtagagacccatgttggccgggaatggcggcttcaggcgcggctggcctttcttgccttccaggctttcgagaagtgcggtttcctcgccgcagatataggcaccggcgccgtggtggacgaagatgtccatcggatagccgagcttgttgttcttgccgagaaggccgtagtcgtagcactcgtcgatcgcggcctgcagcgcctcgcgctcgcggacgtattcgccgcgcacgtagatgtaggcggcgttggcgcccatggcgaagctggcgatgacgcagccttcgatcagcgtgtgcggatcgtgacgcatgatgtcacggtccttgcaggtgccgggctcggactcgtcggcgttgacgacgaggtagtgcgggcgaccgtcgctttccttcggcatgaaggaccacttgagacctgtcgggaagcctgcgccgccacggccgcgaaggccggaggccttcatctcgttgatgatccagtcgcgacccttttcgaggatctgcttggtgccatcccagtggccgcggctcatcgcgcccttcagggacttgtccttgaggccgtagatattggtaaagatgcggtctttatcttgtaacatgcttcacctcttaccgcggcttcttgccgaaaactttaatgtattcggcttcgccgcccttggcgagcgccttggcctgcttgacccagtcgtcacgatcgatgcggcccttgaaattcaggtaaccatcgacccagtcgcgctcggccttcttccagcccgcgacctgcgcgaaggtgaagatgccgagttcgtgcagcgtgccttcgatcttcgggccaacgcccgagatcagcttcagatcgtcgggggtcgcgggccgctcgatgccggccggacggttcttgtcggtgagcgacggctttccggcgtcagcagccggagcagcagcctgttcttcgacggccttggcgttgttcgcggccgccttgggcgccgttaccggcgtcttcagcgcagcattggtctcggcgtccgtgctcttggcccgggcggcttccgacggaggaaccggtgccgcatcaaccgttgcggtcgccgcatcggcgacgaccttcttggcggagaccttcttcttcggctctgcgtccgtcagcgtggtcgggccgccttccggagacgagaaatgacggtcgatctgcgggccgggcgtgatgcttgcgccattgccggcatcgaaggtgtcgatgatctcggccagccgctccggcgtcaggtcttcataggtatccttgccgatcatcaccatgggcgcgttgacgcaggccccgagacattcgacttcttcccaggacagcgtgccttcggcattacgctcgaacggatgatgatggatcttgctcttgcagaccgacatcaggccttccgaaccgcgcagcatgcagggcgtggtgccgcagacctggacgtgggcgcgcgtgccgaccgggccgagctggaactgcgtgtagaaggtcgcgacctcgagaacacggatataggccatgtcgagcatgttggcgaccttttcgatcgccgcgcgcgtgacccagccgtcctgttcctgcgctcgcatcaacagcggaatgaccgcggattgctgacggcccgcagggtatttctggatcgtcttatccgcccagaccgcgttctcgtcattgaaggcgaacgcggcaggctggaattgatcttcggctagtcgacgaacggacattcttcctcacgccttgtcagtttagggcgccacactgcgacgacgtcagagacttcatctcgcaagcataggccgactggtctttctgcagaaacacaacgaagaacttgccaccgttgggcactgcagccttgatttgatagcccctggacaaaagctcgcccatggacgccttgtttgccggcggcgccacgtcttcctggcccagcttggggccaagtccaccggcctgctgggcgtatgccccggaagccaggaggagaacgacggtagcgagcgacggcagcttcattagcggtcgacctcgccgaagacgatgtcgagcgaaccgagaacggcggtcacgtcggcgagcatgtggcccttgcagaggaagtccatcgcctgcaggtgggcatagcccggagcgcggatcttgcaacggtagggcttgttgctgccgtcggcgacgacgtagacgccgaactcgcccttcggcgcttcgacggccgcgtacacttcgccggccggaacgtggtagccttcggtgtagagcttgaagtggtggatcagcgcttccatcgaacgcttcatctcgccccgcttcggcggaacgaccttgccgtcgatcgaggagaccgggccgaccttggcatcgccgagcaggcgattgacgcactgcttcatgatgcggacggactggcgcatttcgatcatgcggatcagatagcgatcgtagcagtcgccgttcttgccgatggcgatgtcgaattcgagatcgttgtagcactcgtagggctgcgagcggcgcaggtcccaggcagcgcccgaaccgcgaaccatgacgcccgagaagccccaggaccatgcatcctccagcgagacgacgccgatatcgacgttacgctgcttgaagatacggttgtcggtcaaaaggccttcgatatcgtcgagaaccttgaggaacggatcgcaccacttgccgatatcctcgaccagttcctgggggatgtcctggtggacgccacccggacggaaataggccgagtgcatgcgggcgccgcaggcgcgctcgtagaacaccatcagcttttcgcgctcttcgaagccccagaccggcggcgtcatcgcgccgacgtccatggcctgcgtcgtcacgttcatgatgtgcgacaagattcggccaatttcggagtacagaactcgaatcagctgaccgcgaatcggaatttccagcttcagcatcttttcgacggcgagcgcgaaagcatgctcctggttcatcggcgcgacgtagtcgagacgatcgaaatagggaacggcctgaagataggtcttcgattcgatcagcttttcggtgccgcggtgcaggaggccgatatgcggatcgacgcgttcgatgatttcgccatcgagctcgagcaccagacgcagaacgccgtgcgcggacgggtgctccggtccgaagttgatcgtaaagttgcgaacgttatgttcagtcatagcgacgcgctccgcgctggcaattggcatgagacggcgaacggagaggcttcaagacagtcgagcctcatctcaattcgcagccttctcgtctcccggaagtacgtaatcggtgccttcccacggggacgtgaaatcgaaattgcggaattcctgcttcagctcgacgggttcgtagacgacgcgcttggcggcatcgtcataacgcacctcgacataacctgtcgtcgggaagtccttgcgcagcggatggccttcgaagccatagtccgtcagcagacggcgcaggtcggcatggccggagaacggaatgccgtacatgtcccaggcttcacgctcgaaccactcggcgcccatgtagaccgacgttgccgacggaaccgatacgccatcggcaacggcaagcttgacgcggatgcgcaggttctgcttcggcgacaggagatggtagacgacatcgaaacgctgttcgcgctgcggccagtcgacgccgcaaatgtcgatcatgctgacgaaaccgcagcgcggatcgtcgcgcaggaacgtcagcagcgccagaattgcttccggcgtcgtggttacgttcaattcgccatagctgatcgacgcatcggcaatcaggtcgccacgcatctcgcggagataagacgacagttcgctcaaggcttcactcatgacagtcctccgcccttagcgctcaatcgttccggtgcgccgtatcttcttctgcagaagcaacaccccgtagagcagcgcttctgccgtggggggacagcccggcacgtagatatcgacaggaacgacacgatcgcagccacgcacgaccgagtaggaatagtgatagtagccaccgccgttcgcgcaggagcccatcgagatgacgtagcgcggctccggcatctggtcgtagaccttgcggagcgccggcgccatcttgttggtcagcgtaccggcgacgatcatgacgtcggactggcgcggcgaagcgcgcggagcaacaccgaagcgctccatgtcgtaacgcggaccggagacctgcatcaggccttcgacggcgcagcaggccagaccgaactgcatccacatcagcgaaccggtgcgcgcccaggtgatcagatcgcgagtggatgtgaccaggaagcccttgtcggccaactcgtcattgatctcgctgaagaacgcactgtcgctgccaatcggcctgcccgttgccgggtcgatgatgcctttcggatgcggcgcgacgagcgccttgtcgcttggggctactcccattccagggctccctttttccactcataaataaagccgatggtcagcacgagaaggaagaccatcatggaccagaagccgaaccagccgatctcgccgaaggaaacggcccacggaaacaggaaggcgacttcgaggtcgaagatgatgaagagaatcgacaccaggtagaatcggatatcgaacttcatgcgcgcatcgtcgaaggcgttgaagccgcactcaaaagccgagagcttttccggatcgggcgccttgtaggcgacggcgaaaggcgcgatcaacagcgaaaggccgatgacggcggcaataccaatgaagatcgcgatcggaatataggaactgagaagtccagtcatcaggttcatccctgcttgccgttacgccgggaggcgcgggtgggcatttgcccggcaagcgaacgtgcgttgtaatctcgccgtggttagcgcagccggagccaaggcgcaagacttttagaatgccaatagcgtactcgtcgccggagtttatcaagcagatgcaacgatgtcgcgacaaaagcatccacagcgattcgagttgcatgcctgaccagcgctcagcgcatggctcggaacaaccgcgcaacggaacagcacaacttgagcatcctcgaccaggctgcctgcgactgtcttcgaaaagagaacttttgaaaatggcgcgagtgacggggctcgaacccgcgacctccggcgtgacaggccggcactctaaccgactgagctacacccgcgcatttcagatcgcgtcgttccggaccatgcttttcagcacctgcgtgaaatggcgcgagtgacggggctcgaacccgcgacctccggcgtgacaggccggcactctaaccgactgagctacacccgcattcatttcaagcgatccggaggctttcgcgtccgtgtcaaagcagcttgccgcttcgatgagcggctaactacggggttcgcatttgagtgtcaagcaggtttggagacaaaacgatgacagcctgcgatttgtttgtgggtgaatgaaatcacatccgaaatcgcccacttatatgtatgctttcgcgcactgcttcctccgcgatcgaccaacgaaccgccctgcccttgtcgattttgttttccacagccgcaagtgtcgggaaaccgggaggtcggcggacgtcgatcgaaaaaaatcaaaaaatcttcacaaacgctcttgcggtttgtccgcgatccgcatagatcacggccatcgacgcggcggacatgatccgcaccgcggagggcgattagctcagttggtagagcgcctcgtttacaccgaggatgtcgggagttcgagtctctcatcgcccaccattttctctcccctttatgtgattgacagaccttgggctttcccttggccgcggttgctaatcgcgtttccgacgattaggttccggccaaatcgaacggcacctcatgtgcttcaggcggagacggaatcatgaaaacacgcgaagatcgccaggcgcagcgggcggccatgccgcgcacgcagctcagcgcccatcatatggaaaacgcgcgtctgctgccggatcgcggcgaattgctctatcgcattccaaacggcggcgtggccgtggaaatcggcgcggcgttcggggaatacacggcggagattctcgaaaagaatcgtccggcgcagctctatctcatcgatccctggagcatggaccgctacagctcgggtctcgatcagatccacacgcagttcgccaaagagatcgaaagcgggcagctgcaccttatgcagggcacttcgctggagaagctcgcggagttcgaggacgattttctcgactgggcctatatcgacaccgatcactcgttcgaactgacctggcaggaactgctgctgtgcgaccgcaaggtcaagcggaccggccgcattgccggccatgatttctgcaccggcaacacggtgaagccgatcgtctacggcgtcgtcgaagccgtgaccaagttctgcaaggactatggctggcagttcgaattcctcaccgtcgaatcgcacgcgcacttctccttctgcctgaagcggctctgagtcgggccacttcacggggagcggcagaggcggacgttccgccctgccctatctccttcctctcaagcgcttgtcggcctttgtgcggactgatagtgccaatggcgaaacgaggaggatcattccaatgaagcagcattctttcggccacctgccgcataccgtaaccaatgtcggcttcggcgcatggcagatcggcggcgcctggggcgacgtcagcgaggcggacggtcgcgcggcgctcaatgcggcgctcgatgccgggataaccttcatcgacacggccgacgtctatggcgacggccgctcggagaaaattatcgccgatgtgctcgagagccgtggcggcgagcgcccgatggtcgccaccaaggccggccggcgactcaatccgcatgtggccgatggctataccaaggccaatctcgaagctttcatcgaccgcagcctgaagaacctcagggtcgacagtctcgatctcgtgcagttgcactgcccgcccaccgaggtgctttatcgtcccgatgtcttcgacgggctgaacgagctgcagaaggccggcaagattcgcggctatggcgtcagcgtcgagaaggtcgaggaggcgctgaaggcgattgagtttcccggcgtggtcagcatccagatcatctacaatctcttccgccagcgcccgagccatctgttcttccaggaggcgcggcgcaagaacatcgccgtcatcgcgcgcgttccgctggcaagcggcctgctttccggcaagatcagccgcgagacgacgttcgcaagcgacgaccatcgcaacttcaaccggcacggcgaggcattcgatgtcggcgagacctttgcgggcgtgccgttcgaggtcggcctgcaggcggtcgaggaggttcgcaagctggttcccgccggcgccacgatggcggcattcgcgctgcgctggatcctgatgagcgacgccgtcacggtggtcattccaggcgctcgtaacgccgaacaggcaaaggccaatgcggcggccgccggcctggcgccgctgacgaacgaggtgatggcagcgagccacgaaatctacgagcggctgatcgctccgcatgtgcaccagcgctggtaacagccgcgtccttcatgcaaaacagaaatggccgggcagcgacccggccatttccttatccggggtttgcccgaattacttcttttcggcgaaggccttgatggaggcggcgacttcggcctgtgccttctcggcgctgtcgaagccgttgacctcgacaaccttgcgctttgccggcagctgcttgtagacgcggaagaaggcctgcaggcgctcctgctcgatctcgggaagatcgctgatttccttgatcttgtcgtaggtgggatcgatggcgctggccggaacggcaacgatcttgtcgtcctgatctccaccgtcgaccatcttcagcacgccgatggcacgaacccggatgatggcgcccggaacgaccggttcgcgcgtgtagacgagtgcgtcgagcggatcgccgtcaccgccgagcgagctggtgatggagccgtagttggccggatagatgaccggcatcgactggaagcgatccacgatgatgcggccggtcttggcgtcgatttcgtacttggtgaagcttccctgcggaatttcgatcgccgtgaagaactccttgctatcgtcgttcggctgcgggaaatcgagataggaaacgtcggcagcggcggcgacgccggccgtgagaagaacggcagcggccgcagaaataattgccttcataggagataccctcaattggtattgcgaagaaacgccaaccgcctatggggtttgcattacagcgatgtgacatgtctcaggcgcccggggcgatccaaatgacattctcgtgatcgcccatccaacgcctatgcggcgccgcgttcgcgcttcatctcgtgacgcatgatgaaaagcgaggccgccagaatcaagcaggcgccgagccacaagtagcccgccggcgcatagccgaagaccacccagccggcgagaacgttgagcggcagcttcaggtcgtcgaagggctggacataggcggcatcggcggcgctgtaggccagcgtcaggagatattgcgccatgacagtcagcagaccggccgcgacgagcaacatcaataccgtgcctgttggcatcgcgaatccggccgcgagggcaaggccgccattgaccggtgtgagcaggaccagcagccacacggtgatcgtctccggcctttctattcccgtcaggctcttggtgatcagcgacgaggcgccccatagcaatgcagagacgatcggcaaaagggccgcccagctgaaactgtccgaccagggctgcaggataatcatggcgccagcgaagccacaggccgtggcgctccagcgggcggcgccgacctgttcgcccaggaacaggcgggcgccgaggatgatgaagaagggcgaggtcatgaccagcgcgatggcctgccagatcggcacgctcgcaagaccggcgacccaggtctgcacgccgagtgccgccagcacgacgcgaacgacgtggcgccagggatattgggtgcgcatcgccgcaaggcccgtcttccacagaaagggcagcgaaaagacgagcgcgaaggcgtattgccagaaggcgaccgaggcggagggaaagaccagggtcatcgtcagccactgggtgacgatgttgagaacggcaaaggcaatgccggcaagcaccatccagcttgcaccggcaagcgcacgcgatgcggatgcggaaatcggggtagtctgattcatgtcattcatccgaacaaagggaccaacataaatcaggacgcatgaacgcgggtgccgacgcggcggacgatgccgccccgcgtaccctgctcattctctttcatccggactatgaccgtcggctccggaattcaaccggatctgctgacccttctcacctgagatgaaaaggcgctcgcgggctcaagcttgcgctcttaccgccggtggggaattgcaccccgccctgagaatgatccatgcgtagttcaaacaggcgatcgcggcaaggctcgcaaatgcgaaaagggtccggctttcgccgaacccttcgaatacttgagctgccggtctcgttgcccggcggccaagcaaatccaatcagccgttgacggcttccttcaggcccttgccgggcgtgaacttcggcacgttgcgagccggaatgtcgacttcagcgccggtcgacggattgcggcccttggtggctgcgcgatgggaaacggtgaagctaccgaaaccagcgaggcgaacgtcgcccttgcccttgagctcagcctggacaacttcgaaaacagcgtcgacggccgaagcggcatcggtcttcgagagtcctgccttttcggcaactgcggacacgagttcattcttgttcatgtttccacccctttcaaatggttcgaaacgactcaaatctatagccgggcacggaagttggtgcatcaggcccgccgcaccccaaagagcctgcaaatcaaggaaaagcaagcgtctccgtacggttttcacaaaaaaaggctggcaaaaatgccagccttttcagggtttttaagcaatagggcacgaatgtggcaaacaaggctcaatgagcgatggatgcgccggtctcgtcgagcccttcgaccgttgcgatgacaggcgtttccaccgtgccatcccactcgatcgcctccggtctgcggaccagagcatgcttgatcacctcgcccatgcgggacacagggatgatctccatattgttcttcacattgtccggaatctccgccaggtccttggcgttttcttccgggatcagaacagtcttgatgccaccgcgcagcgcggcgagcagcttttccttcaatccgccgatcggcaggacgcgaccacgaagcgtgatctcgccggtcatcgccacgtccttacgaacagggatgccggtcatgatcgagacgatcgccgttgccatgccgacgccggccgatgggccgtccttcggggtcgccccttccggcacgtggacgtggatatccgacttgtcgaagcgcggcggctcgatgccgaaatcgacggcacgcgagcgaacgtaggacgccgccgcagaaatcgattccttcatcacgtccttcaggttgccggtcacggtcatgcgacccttgcccggcatcatgacgccttcgatcgtcagcagttcaccaccaacctcggtccaggccagaccggtgacgacaccgacctgatcctcgccctcggcttcgccgtgacggaagcgcggaacgcccagatagtccgaaatgttctcggcggtaaccgcgaccgatttcgtcttacccttgatgatctcggtgaccgccttgcgggcgagcttcatcagttcacgctcgaacgaacggacaccggcttcgcgtgtgtactgctggctaatcgccatcagggcatcgtccgaaaccgagaattcgttcggctgcagagcatgttccttgatggccttcggcagcaggtgccgcttggcgatctcgcgcttttcgtcctcggtgtagccggcgatacggatgacttccatgcggtccatgagaggtgccggaatgttcagcgtattcgccgtcgtgatgaacatcacgtcggacagatcgtattcgacctcgaggtagtggtccatgaaggtcgagttctgtgccggatcgagcacttcgagcagagccgacgacggatcgccgcggaaatcctggcccatcttgtcgatttcatcgagcaggaagagcgggtttgacttcttcgccttcttcatagactggatgaccttgccgggcatcgagccgatgtaggtgcggcggtgaccgcggatttcagcttcgtcacgaacgccaccgagcgccatgcggacatactcacggccggtcgccttggcgatcgactgggcgagcgaggtcttgccgacacccggaggtccgacgaggcacaggatcgggcccttgatcttggtcgcgcgggcctggacagccagatactcgacgatgcgctccttgaccttgtcgagaccgaagtgatcggcttcgaggatcttttcggcgttgttgagatccgtcttgatcttcgacttcttcgaccacggaataccgagcagccaatcgagatagttgcgcacgacggtggcttccgccgacatcgggctcatctgacgcagcttcttcagctcggcatccgccttctcgcgaccttccttggagagcttggtcttggagatgcgctcttccagctcggccatctcgtcgcggccttcctcgccgtcgccgagctccttctggatcgccttcatctgctcattcaggtagtattcgcgctgggtcttctccatctggcgcttgacgcgcgagcggatgcgcttctcgacctgaaggaccgagatctcaccttccatgaagccgagcgccttttcgaggcgtgccttgacgctggtggtttccagcatctcctgcttctcggtgatcttgatcgacaggtgcgaggcaaccgtatcggccagcttcgaataatcgtcgatctggctggcggcgccaacaacttcgggcgagatcttcttgttgagcttcacgtagctctcgaactcggacacgaccgagcggctcagcgcttccagttcgaccggatcgtcgtgcggctcctcgagcacgtgaccgagggcttcgtagaaatcctcgcggtcggtgtaggcgtcgatttcggcgcgcgcgcggccttcgacgagaaccttgacggttccgtcgggaagcttcagcagctgcagaacattggcgacggtaccgacattgtggatggcggacggttcgggatcatcgtcgctggcattgatctgcgtgacgagcatgatctgcttgtccgagcccatgacttcctcgagcgcgcggatcgatttctcgcggcctacgaagagaggtacgatcatgtgcggaaagaccacgatgtcgcgcaggggcaatactggataagcggtgctcgcaactgacgttttcttcgtcattttatttcctttccatcgtcccgttgccgggctcttctggcgcggccgtttgggaccggccgcactctcacttggattaacaagtggaggttctgactatgcttttcaagctgccacatggcccgtgtccgcttggacatgacagctatgctacaacggaacacctcactatgtcgcgcctagctggaccggcgctgaccatttccgaaccggctaaaatacaacgccgaaacacaccaacggaatcattccataattgccaagggcggatgaattcgcaacggcaacgaacgtggtttcgggcttcatcagcaagttttatcggcatttgcaggtgccgcgaacggtttttcaaatagaaaggggcctgccaacggcaagccccttgaattcacgcttcgtatcgcgctgatacttaggccgaggcgttggccttttcttcctggcgatcagcgtagatgtagagcggacgcgaggagccgcggacgacttcgtcggagatgacgacttcgcgtacgccttcgagcgtcggcagttcgaacatcgtgtcgagcaggatcttttccatgatcgaacgcaggccgcgggcgccggtcttgcgggtgatcgccttgcgggcgatttcgcgaagggcgtcctcgtggaaggtcagttcgacatcttccatctcgaacaggcgctgatactgcttgacgagcgcgttcttcggctccgacaggatctggatcagcgcgtcttcatcgaggtcctcgagcgtcgccagaaccggcagacgaccgatgaactcggggatcaggccgaacttgacgagatcttccggctccagttcacgcagcacttcgccgacgcgacggtcatccggagcggcaacgctcgcgccgaagccgatcgaggtcttttcgccacgggccgagatgatcttgtcgagaccagcaaaggcgccaccgcagatgaacaggatgttcgtggtgtcgacctgcaggaattcctgctgcggatgcttgcggccaccctgcgggggaaccgaggcaaccgtgccttccatgatcttcagaagcgcctgctgcacaccttcgcccgacacgtcgcgggtgatcgacgggttgtcggacttgcgcgagatcttgtcgacttcgtcgatgtagacgatgccgcgctgcgcgcgctcgacgttgtagtcggcggcctgcagaagcttcagaatgatgttttcgacgtcttcaccgacatagccggcttcggtcagcgtcgtggcatcggccatcgtgaagggaacgtcgatgatgcgggcgagcgtctgggcaagataggtcttgccgcaaccggtcgggccgaccagcatgatgttcgacttcgcaagctcgatttcgccgttcttcgtggcgtgcgcgagacgcttgtaatggttgtgcacggcaacggacaggatcttcttcgcctggcgctggccgatgacgtattcgtcgaggaccttgatgatgtcctggggcgtgggaacgccgtcacgggacttgaccatcgaggacttgttttcctcgcggatgatgtccatgcacaattcgacgcattcatcgcagatgaaaactgtcggtccggcaatcagcttccggacttcgtgctggctctttccgcagaaggagcagtacagggtgttcttagagtcgccgccgttgctgccgctgactttgctcatatcactttccttccagcacgccgcatttcaaggtgaaagtgcggtccactcattggcctgcccccacttggagctacagccggccaaggccgtcaaggggtacgaaccgggtccagactaggccgtcatggccccggcggcaacgaactccccttcgaagccaaatgctatgtcataagaattcaacatagcattaatacttgagattggttcacccgccactcggtttattccctagttcgatcacaaatgagatagaactgtggcggagaaaacaccatccctagttctgactaggcgtgtcaccttcgatctcgacacgagacgtcaggaccttgtcgatcacgccccagtccttggcttccgccgcatccatgaaatggtcacggtcgagcgtcttttcaacttcctcgtacgtccggcccgtgtgcttgacgtagacttcgttgaggcggcgcttcattttgagaatgtcgcgcgcatgacgttcgatgtccgaggcctggcccgagaagccgcccgacggctggtgaaccatgatgcgcgagttcggcgtggcgaaacgcatgtccttgtcaccggccgccagaagcagcgagcccatggacgcggcctggccgatgcacagcgtcgacacggcaggcttgatgaactgcatcgtatcgtagatcgccatgccggcggtgacgacgccacccggcgaattgatgtagagcgcgatttccttcttggggttttcggcctcgaggaaaagcagctgggcgcagacgagcgtcgccatgtgatcctcgaccggacccgtcaggaagatgatgcgttccttgagcaggcgcgaataaatgtcgtaggagcgttcaccgcgattggtctgttccacaaccatcggcacgagggccatagcggtatcgactgggtttctcatgtgcgtcctttgtcaacgtctttccggcccgacgccgggaatcaaagaaaatgcgttatccctacatagaacttccctacccttctcttcaagacgcgccttgggataacgttaagacggcgggaaaccatgcctgttttgatgagccctctgtagggagattcttcgaaaccgtcattaacggttggcggccatactcccggctcacagcttttctcttcagcaagatgaagaaatgctgaattcgcgctccacggggcgccttcatttacctcgtggaaagcctatcgccagataacggaaggcgcctgcgggctaccgctttccgattaagaaagtcgccagcttatttagcgaggatgcggtcatacaaggggtattgccgtgttcaatgttacgacaggactggccatttggtgcaccgaggctttgacgctcgcgctggtcgcgttcattgcctggcgccacaatgtccgagacaagacttatttctactggggcctgggtttcatgctcagcggcatcggcttcggaatggtggcgttgcgtgcctacattccgagctatctgtcgatcgagaccggcaatacgatagcacttttcggccagagcgcctgggtggccggatatctggcgctcgaccgacgcaagatcgaatggtgggtgctgctgccgccggccgtctggctggccggcgtgttcctgccctgggtgcacgacgactatccgaaccgggtcgccctctacaatctcgcttcggcaaccggcgcgacagcgctgacaatggcggtgagctcgcccggcctcaacagggagtcggcgcgcgccaagctcgcggtcatgttcattcttcagagctgcatcagtttcgtggccgcgggcgcgatcgcggtgttgtcgcccgacgatatgacagcggccaatatcgcggggatcgcggcgatgggtacggcgctgatgttgacactcgcctgtgcgctgacggttcgcctcatcatggggcgttcggagcagaagctgcgtctcctcagcctgaccgacacgctgacaggtgttctcaatcgccgcggactgttttcgcagttcacgcgtatccagacaaaggcattcgacgagaaccggcaggtggccgttcttctgtttgatctcgacaatttcaagcgcatcaacgatcgcttcggtcaccagagcggcgatgccgtgctgacggtgtttgcacgcacggcgcagcagttcacgccagccggcgtgttcgggcgcatgggcggcgaggagttcgcggccttcacgagcgtttccgaccagaccgaggcggaagcgctcgccgaaacgatccgcaccgagttctgccgcgttcccgtcagcaccggcgacgccatcattccggccaccgtcagcatcggcgtagccctcgcctcgcccatcgaggcgaatatggacaagctggtatcggcggccgaccgcgcgctctacgccgccaaggcggctggccgcaactgcaccgtcaccttcggcgaagccgaggcggcagcgccaccaccgccggaagaaaagccggatcacaccacgggcgagctcgttccgacgctcgacgaccagatccatgcgctgcgtcgtgtaggttcactcggacgctgacaataggttgtgctctcttcccgagatcgggcaaatccgctaagcctcgggcatgattacattgccttatatgtccattgaccctgccgcgcgccgcgtttccatcgatgcgcgcagccccttgttctacagcaatcccaatgccgcctacgcggcattgcactcccattgtcccacattttactgggaagagcagaagcagtggttcttcaccggttatgaccatgtgaacgcgctcctgcgcgaccgccgcttcggccggcagatcctgcatatcgccagccgcgaggatctggggcttcccgaacccgaccagcacgtcgccaacttcgacctcgcggaacgctactccctgctcgagctcgagccgccggaacacacgcgcctgcgcacgctcgtcaaccgcgccttcgtttcgcgacacgtcgagaagatgaagccggagctcgaagaactcgccaaccggctcatcgaccaattcgagcacaagggcgaggtcgagttgctctcggccttcgcagacatcattccggtcacgatgatcgcgcggatgatcggcattccggaggagatggggccgcagcttctgaagtggtcgcacgcctatatccgcatgtatctgttcggccgcacccgcgcggacgaggatggcgcggaacaggcggcgacggaattcgccgactacgtcaagacagtgatcgccgaacgccgcgccaatccgcgcgacgaccttttgacgcacatgatccacaccgagcacaagggccagtttctgaccgaggacgagctcgtctcgacgaccatcgtgctcctcaatgcggggcacgaggcgacggtgcatcagatcggcaattcggtgcggatgatcctcgacagcggctatgcgccggcgcagctgttcaaggatgaagagacgacggagcggaccgtcgaggaatcgctgcgcatctgtgcgcctgttcacatcttccagcgctgggcgctggagccggccgagatcgacggcatatcgttcaagcgcggcgacaaggtgagcctgatcctggccgcggccaatctcgatccgctgaagttcaccgatccgctgaccttccggcccgatcgtcgcgaggcgcccaacctctccttcggcgccggcattcacttctgcatcggtgcgccgctggcgcggctggagctcaacatcgtcctgccgatcctgttcgagcgcctgcccggcctgaagctcgcgaggacacccgaggtcaaggacgtctatcacttccatgggctggacaggctcgatctcaactggccctctcggtgagaaacgaccaaataaaacgaccgcgctccctttcgggagcgcggccatccgccttgggaggcacagctgcctgttaacggcaggctgttctttggtttgtttgccttactcggctgcctgcagcgtcggagccggctgatcgagctcttccggcagctggcctgccatggcggcggcgagcttttcctggtcgagctcattttcccagcgggcgaccacgattgtggcgacggcgttgccgaccagattggtcagggcgcggcattccgacatgaagcgatcgataccgaggatcagcgccatgccggcgaccgggacagaggggacgaccgacagcgtcgcggcgagcgtgatgaagcccgcgccggtgatgccggcggcacccttggacgacagcatcgcaacgaggagcagcaggacctggtcggtcagcgacagctggatgccggtcgcctgggcgatgaagagcgcagccagcgtcatgtagatgttggtgccgtcgagattgaacgaatagccggtcgggatgaccaggccgacgaccgagcgcttgcagccggcgcgttccatcttctgcatcaggttcggcagggccgcttccgaggaggacgtgccgagaaccagcagcagttcttccttgatgtagcggatcagcgacaggatcgagaagccgttatacttcgcgaccgcgccgagcaccaccagcacgaagatgagcgcggtgatgtagaacgtcaggatcaggaaagcgaggttggcgaccgagccgatgccgtacttgccgatggtgaaggccatggcgccgaaggcaccgatcggggcagccttcatcaggatagcaacgaggcggaagatcggtgccgtgagcgcggtcaagaaatccgtgaccggcttgcccttctcgccgaccataccgagcgcgacgccgaacaggaccgagaagaacagcacctgaagaatgtcgccctgggcgaaagcgccgacgatcgtttccggaatgatgttcatcaagaagccggtgatcgtggtttcatgcgccttcgtggcgtaggtcgagaccgccttggcatccagcgtggccggatcgatgttcatgccggcgcccggctgcaacaggttgccgacgacgaggccgacgatgagcgccagcgtcgagaagacgaggaagtagatcatcgccttgccggcgacgcggccaaccttcttgagatccgacatgccggcaatgccggtagcgaccgtgaggaagatgaccggcgcgatgatcatcttgaccaggcgaatgaaggcatcgccgagcggcttcaggctggcgccgaattcgggatagaaatggccgatcagcatgccggcgatgatggcgacgacgacctggaaatagagatgccggtagaacgggatcttggtccgcggctcggcggctggaattgcaacacccatagtgtcctccataaagcccccaacctgaccggcctcccggggcaaactgcgtttcaatcaacagccttccggctattcgcggatactttgcaatggccgtgccagtttccgaacgccgcaatatcgccatgattcaacacgcttttttcttcaggcaaaactttgcgggatcgggattgagcggactatcgcacaattccatttgacgaatgtgcgaaaattcgcacactataccccatgccagacacgaagagcattgcgggatttgagaccatcgacgacgtcgatcgcaggacgcggcgcggctggatcctgttcgtcgcgctatcggccgccctgcttgccgccgcgctgatcggtgctgcactttacggacgcagctcgtccatcaacgcgctcgcggcacagagccagaccgatgccagcctgaaggtggcattgctgacggcggttctggagcgtcctcgcgcgttgccgttgctcctcgccgaggaccagcaggtcctgaatgccctcgcgtccacgagcgccaacgatatcgacatattgaaccgcaagctcgagcggctggtgacgggcacgcaggcagccgtcctctacgtcatcggcacggatggccttgccatcgcttccagcaactggcgcgaaccgatcagcttcgtcggcaacgactacacgttccgcgactatttcaagcgggccatgcagcagggaacggcggagcatttcgcgctcggcagcgtcagcaagcggccggggctctacatttcccgccgggtcggcagcgccgacgcgccgcttggcgtcgtcgtggtgaagctggaattcgaccagctcgagacagactggcgcgacacccgtcggccggtctacgtgacggacgaaaacggtgtcgtgctgatcaccagcatccctgcctggcgcttcatgacggccgtgccggtggcggagcaggagatagcctccatccgcgaaagcctgcagttcggcgacgccccgctgacgccactgccggtcgtcaggcccgacgtcatcgacccccgcacatcgcttgtttcggcaatccttccgggcagaggcgcggcggaattcctgcgcctctacgctcccgttccaacaacgccctggcggctggagtatctggtgccgacggaagcggcggtcgcctcttccgtccgcgagatgcgattgctttcgctcgccgtgctggtccccatcctcgcggtcgcggcgttcctgctcagacgccggcaaagcgcggccatgcgcatcgccgtggagctgtcgatgcgagaggagctcgagcggcgggtcgtcgcgcgaacggaggatctcagccgcgcgcgcgaccgtctgcaggcggagatcgccgatcacaggaacaccgaatccaggcttcaggtcgtgcagcaggaactggtccaggcgaaccggctggcgattctcggccaggtcgcggccggcgtcgcgcatgagatcaaccagccggtcgccaccatccgcgcctatgccgataatgcgcgcgttttcctcgaccgcgaacaggccgaaccggtgaaggagaaccttggtgccatcgcggctctgaccgagcggatcggttcgatcaccgaggagttgaaggctttcgcgcgcaaggggcggacggcaccggagccggtggaactgcgcgatgtgatcgagggcgccgtcgtactgctcaagagccgcttcgccggacaattgcaggcgctcagcatcaagctgccgccggccggattgcaggttctcggcaatcgggttcgcctggagcagatcctgatcaacctgtttcagaacgcgctggaagcgctggaaggtcgtagcgacgcccgggtggagatttccgccgtcacgacggacgacgacgtcgaggtgatcgtggccgataacggcccgggaatacccgcagccatcctcgcctcgctgtttacacccttcaacacctccaaggagaagggtctcggtctcggtctggtgatctcgaaggatatcgtcgccgattacggcgggcgcatcgaggtctccagcagcgatcagggcaccagcttcatcgtgcatctcgtgagagcaaagccatgaccgacgccgcatccatcttcctcgtcgacgacgacaaggatcttctgcgtgccaccaagcagacgctcgaactggcgggcttcagcgtttccgccttctcgtcggctgtcgatgcgcttgcggcgctgacaccggatttcccagggatcatcgtttccgacatccgcatgccgcagatcgacgggctgcaactgttcgaccgtgtgcagcggcaggatgaggatcttcccgtcattctggtcaccggtcacggcgatattccgatggcggtgaaggcgatccagcagggcgtctatgatttcatcagcaagcccttccccgccgaccggctggtgcaaagcgtacgccgagcggtggagaagcgacgtctggtgctggagaaccgggccttgcgcaaggcaagcgagcaggtgcgcgacgacctgccgctgatcggccagacgccggcgatggagcggctgcgccatacactgcgacagatcgccgacaccgatgtcgatgtgctggtgaccggcgagaccgggagcggcaaggaggttgtcgcgagcctgctgcaccagtggggacggcgtaattcggggaatttcgtggcgctcaactgcggcgctctgccggagacggtgatcgaaagcgagctcttcggccatgagccgggcgcctttaccggcgcgcagaagaagcgtgtcgggcgcatcgaacacgccagcggcggcacgctgtttctcgacgagatcgagagcatggcgccgtcgacgcaggtgcagatgctgcgcgtgcttgaaatgcgcgaggtgacgccgcttgggaccaacgaggtgcggccggtcgatctgcgcgtcgtggcggccgccaaggtcgatctcggcgatccccggcagcgcggcgatttccgagaggatctctattaccggctgaacgtggtgacgatctcgatcccgccgctcagggagcgtcgcgacgacattccgctgctcttcggctatttcgcagagcgagcggcgaagcgcttcaggcgcgacatgccggtggcgtcttccgccgtgcaccgccatttgcaaagccacgactggcccggcaacgtccgtgaactctcgcatttcgccgagcgtttcgtgcttggcgtcgagcagttcgtcggcggcgcatccgacccgaagcccgccgatctcggcgagggcctgcccctgcccgatcggctggaccgctacgaggcgagcatcatccgggacgtgctcgacgccaatgacggcgatgtgcgcaggacgatcgcggaactcggcatcccgcgaaagaccttctacgacaagctgcagcgccacggcatcgtgcgtgccgactacgcgccgagcgacgaacgcggctagcctgcgttcacgacaccgtagcgtgcggcgggcttgtcacgcgagaggttgggcccgagcgcgaaacgcgccgcggtcgccgtgtcgagatcgccgcgatcgggcaaggaggggatggtgatcagttcgccctgatcgaagcctgaaagggctgcatccaccatgtcgttcacgtccatcaccatcgatggcggcagatcatcgaacgagcggccgacgcgctcgaagatttccgtgcgggtcagacccggcatgaccgcctgaaccctgacgcccttttccgcgacttcggaatggatggcctgggtgagattgaggacgaaggccttggtggcgctgtatgtgccgttgaaacgctccggaatataggcgaccaccgatgcgatgttgacgatggcacccctgccccgcccggcgaaagcctgcgcggcggcaatggccagccggttggcggcgacgacgttcaactcgatcatcgtctcgagataatcgatgtcatcgtccaggagcttgcccttgggcccgatgccggcattgttgacgagcaggctgatatcggtgtcctcgcgcaggcgcttttcgacgttcctgacgtcggcgcgatcggtcaggtcggccggcaggacgctcaccttcacgccggtctcctcggtcagacgatcggccaacgcctgcaggcgcgcggcatcgcgggcaacgagaacgagatcgtatccgcgcttggccaggcgatcggcataggtggcgccaatgccggacgaggcgccggtgacgagtgcggttccgagagtagacattgcagcattccttccttgtttgaaccgaccctgtttgatcaagggagggcgcttaaatttactggtatataccactatatttaagcgacgaattggcgtgcgcaagagccttggaaaaagatctgacgtttttagcggttgacggatcgccagcaatcggaagacatcagcggtggagaacaagcgatggcagagagcagcgccccggacggggcatggaattattgcagcaacagcgcgctcaagcgcgcctcacggcaattgggccagctttatgaagacgtgctggcgccgagcggcctgaagatcacgcagtacacgctgctgacgcagatcaggctgggccgcgaaacgccgctgaagacgctcgcggaggcgatggtgatggatctctccgcgctcggccacacgctgaagccgctgcagcgcgacgggctggtcgaactggtggccgacaagcacgaccgccgcgtcaagcgcgtgcggcttaccgacaggggcaatcagttatggagcgatacgaacggcttgtggcgcgacgcacaggcgcgcttcgatgcggcgttcggcaaagaggcctctgaaaatttgcggcggaccatggacctcatcgcatcgccgggctttgccgcggcgtttgccgaggctcgaaagcatcaggactaaaggccgcgccacaaatatcaccggatggtgacaaggccatcaaagtatgatgacgtaatccttgcgcgtcgtttcaacgacttcccaggttcccttgaagccgggtctcaggatcatccggtcgccggtgcgcaggtggaccggctcgccaccgtcttcggtgacgatcgagtggcctgacagtacgttgaaatactcccactcatcatagaggatgcgccacttgcccggcgtgccctcccatatgccggcatagagaccgccatcggcctcctccagattccatgtccggaattgcggatcgcccgagatcagccgaccctccgccggggcgccgacctcaggttcgacgcccgtgatatcgagttggagatggtttgccattgcgcttcaaaccctcgccaacgactgttcgagatcggcgatgatgtccttgacgtcctcgataccaaccgacaggcgcacgacatccgggccggcgccggcggcggtcttttgctcgtcggtcagctggcggtgggtcgtcgaggccgggtggatgaccagcgagcgggtgtcgccgatgtttgcgagatgcgagaagagctgcaagccctcgaccagcgacttgccggcctcgtagccgcccttgacgccgaaggtgaagacggagcccgccccctttggcgaataacgttgctgcagcgcgtggttcggatcgtcctccaggccggcatagttgacccaggcgatcttgctgtgcgccttcagccatttggcgaccgtcgcggcgttttcgctgtggcgctgcatgcgcagcggcagcgtctcgatgccggtcaggatcaggaaggcgttgaagggcgagatggccgggccgagatcgcgcagaccgagaacgcggcaggcgatggcgaaggcgaagttgccgaaggtcgagtgcaggacgacgccattatattccggccgtgggctcgagagcatgggatagttgcctgacttcgaccagtcgaaggtgccgccatcgacgatgatgccgcccatggaattgccgtggccgccgaggaacttggtcagcgaatgcacgacgatatcggcgccgtgctcgatcggacggatgagataggggctggccatggtgttgtcgacgatcagcggcaggccgtgccggtgcgcgacatcggcgatcgccgcgatatcgacgaaggtgccgccgggattggcgaggctttcgatgaagatcgcccgggtgttctcgtcgatctggctctcgaagctcgccggatcggcggaatcaccccagcgcacctgccagccgaaattatcgaaggcatggccgaactggttgatggagccgccatagaggcgcctggcggcgacgaagttttcgccagggcgcagcagcgtgtggaagacgatcacctgcgctgcgtggccggaagcgacggcgagcgcggccgtgccgccctcaagtgctgcgacacgctcttcgagcaccgcctgggtggggttcatgatgcgggtgtagatgttgccgaattcctgaagcccgaacagtgctgcggcgtgatcggcatcgttgaagacgtaggccgtcgtctggtagatcggcgtggcacgggcgccggtcgacggatcgggctttgcgcccgcatgcacggccaacgtattgaaacccggatcattcgcggtcatgaagtgctcccgttctgatttgactttgctgctttgacttcgctgggcggagcatagcgaacgatcgccaaaagttaatcgccatccgtttcaaccgagacgcgtttggcgaaaaatttgcccttctcagccgatgaggcgggggtactcgatcgccgggcagcggtccatcacaaccttgatgccggccgcctcggccttggcggccgcggcatcgtctcgaacgccgagctgcgcccagatcaccttcggtcgcgggttcatcgccagcgcctcatccaccacctccgacagataattggaagcgcggaagacgtcgaccatgtcgaccggcacgggcacatcagcgagacggccgaagacctcctgcccctggatgcgcttgccgacctggccgggattgaccggcacgacctcatagccgcgcgacaggagatagcccatgacgccattgctcggcctggcgggattgggcgacgcgccggtgagcgctatcgtcttcaccgagcgcaggatatcgaggatgtagtcgtcgctatagtgatcgtgatccatctggccttgtctccaactgaatgacaccgggggggtgtctgttatatataataggtgcgcctgatgccgaaggaggagatcgccgtgagaaaagtgcttgtgttcatcgccgcgctcattgccgcgacgccggctctggcgatatcgcgctacaattcgcagacgatcagctgcgatcgggcgcgcgccgccatccataacgagggagcggtcatcttgcgctacccctccacccgcgttcggggcatgacgctctacgaccgatatgtgcgcaacagccggatgtgcgacgccaacgaatacgccgaatggaccactattccgacgaaagacaacccgaaatgccgggttctgaattgccagaatatcgacaacctggacgggacattcatcattccggattactcgctctgagacccgccacagcggttgagcgagtgcccagcggacgggcataaaacccaccaattttaagtgacgcgccgcgccgacgtgcggctttctgtgatctatttgcatcacccatccgggttaacgtgcaaatccccatcgatgttcactgtatatactgtttatgtccccattcgttcacgttcattttagaaacacctcatagttgaatgagcaaaaacggtttgaaacttctggcgtacgtgtctcaggaagcggcaggcgatatgatcgtccggcggttgcataatcgattaagcagagaggacgccgcatacctccgccaccatggtcgctgttgcattttcctgatgacggcgtaacaagatttattccgtcctctcgccacaccatcaggtagttgttttgtccttcaccgtcatcctgctggtcctgttcggcgcgcttcttcacgccacctggaacgccttgatcaaggccgggacggacaaggcgctcgatgccagcctgatttcggcgggcggagcgatcgcggccctgccgttcctgccgctgttgccgtttccgaataccgatgccctgccctatattggcgcatcggcgatcttgcagttcgcctatttccagctggtcgcgggcgcctatcgcgccggcgacatcgggctcgtctatccgctaatgcgtggttgcgctccgcttctggtggcggcaacgagcgggttcgtgctcggcgagagcctgtccgggggcgcgctgatcggcacgatcaccatctgcgccggcatcctgacgctcgccttcgaggccaagcgcggcagcggccacgccattcgtctggcgctcgccaacgccgtggtcatcgccacctacacctatgtcgacggcatcggcgcgcggatatcgggcaatgccatatcctatacgctgtggatgtcgctgttgccgccggtgctgctcatcagctgggcgatctcgcggcgcggcgcctatgcggtggccatgcatgtgaaagtcaactggtggcgcggattgatcggcggcgccggatcgatcgcatcctacggcctggcgctctgggcaatgaccaaggcgcccgtcgccaccgtcgccgcgctgcgcgagacgtcgatcctgttcgcgctcatcatctccgtcgtgttcctgaaggagaaagccagcccctggcgctatctcgccggcgcgatcatcgcgctcggcgggctgctgctgaagctggcgtgagctcccccgggttcagtcccgcgtccagtccggcatcctgttttcgaggaaagcgccgatcccttcttccgcatcctcggtcatcatgctgtcgaccatgacttcggcggcatagccgtaagcttcctcgaccggcatttcgacctggcgatagaaggcttccttgccgacctggagcgccatcggcgatttgcttgcaatcaccgatgcgtatttggtgacgacctgctgcagatattgtttcggcacgatgcggttgaccaggccgaaatccttggcggtcgaggcgtcgatcgtctcgcccgtcagcagcatctccatcgcctgcttgcgatgcgcggaccgcgtcagcgccaccatcggcgtcgcgcagaagagcccgatattgacgcccggcgtgcagaaggtcgcggtatcggtgcagatcgccagatcgcaggaagcaacaagctggcacccggcggcggttgcaaggccgtcgatctcggcgatgacgggcttcggcagctttgtgatctcaagcatcaggtcggccgcgagcgcgaaggtttcctcgaagaaggcctcgccatcatcggcatcggcgcgatgctcggtcaactccttgagatcatggccggccgagaagacatcgcctgatgatgcgatgatcaccacacgcacgccgtcgtcctcggccgcattctgcagttcgcccatcagcgtctccatcatcgcgagcgacaggtgattggcaggaggattgttcagcgtcagccgcaggatgccatcggaaagctggcgcagcacgagcgaagcgctggcattgctggcatcggtgcggaacgatagaacttcggccatgatgaaactccctgcatgtcgatttcgtgctatcagtcctgccacaaaaggccagtcatttcgaggagaagcgatgccgtcggcgccaaagcgctagtgtcgcgatgccgaaagttgaggtatcaaaataccacacacctaactcattgatttcatttgcttgtttttacagccacggcccgcagcaatattgacgctgtccacctcaacctctatacacaccgccagaacgcagcctttcccggctgctttctttttggtgcgccccagggctcccaaatcaagcaacaagaaacgccctttcgccttcgggccaagggatcaaaagagagtaactactatggcaaccttctcccagaagcctgcagaggtagagaagaagtgggtcatcatcgacgccgaagggcttgtcgttggtcgtctcgcttccgttatcgccatgcgtctgcgcggcaagcacaaggctaccttcactcctcacgttgacgacggcgacaatgtcatcgtcatcaatgccgacaaggtcgtattcaccggcaagaagtattccgacaaggtctactactggcacaccggtttcgccggcggcatcaaggagcgtaccgctcgccagatcatggaaggccgcttcccggagcgcgttcttgaaaaggcagtcgagcgcatggttccgcgtggcccgctcggtcgtcgccagatgaagaacctgcgcgtatacgctggttccaaccatcctcatgaagctcagcagcctgtcgctctcgacgtggcctcgctgaacaagaagaacgtaaggagcgcctaagaatggctgacctctcctccctgaaggatctcggcacggctaccgaagcttcggctccggcacacgtccgtaaggtcgattcgcttggccgctcctacgcgaccggcaagcgcaagaacgctgttgctcgtgtatgggtcaagccgggctccggcaagatcgtcatcaacggcaaggaattcacggaatacttcgcacgtccggttctgcagatgattctgcgtcagccgatcgtcgctgctgcccgtgacggccagttcgacatcatcgcaacggttgccggcggcggtctttccggccaggctggtgccgttcgtcacggcgtctccaaggcactcacctacttcgaaccgggcctgcgctcggtcctgaagaagggtggcttcctgacccgcgacagccgcgtcgtcgagcgtaagaagtacggtaaggccaaggcccgccgttcgttccagttctccaagcgttaatcgcttcggacttcggaatgtggaaaggtcgggtgcaaacccggccttttttcgtttagggcatgcgctttgacaatccgttaccgtgaattataattcacacatgatagaagtacgccaaacgcctttattcgccaggtggcttggcgacctccgggatggcagagcccgcctgcgtatcgctgcgcgcattcgcaggatggaactcggaaatccaggtgatgtgaaatcggttggcgaaggtgtgagcgagatgcgcatttcctacggaccgggctatcgcatttattttatccgcgctgcggacacgatcaccatcctgctttgcggcggagataagtcctcacaaagccgcgatatcgctctggcaaagcagatggcgaaggagatttgaacatgcctctcgaaaccacacgcttcgacattcaggatcacctgaaaacacctgaagaccgacttctttatcttgaggcggcattcgacgatggcgatcctgcccttatcgcgcatgcgctaggcgatgtcgcccggacagtcggcatgacctccattgccaaggacgcaggcgtcacgcgggaagcactttacaaggcgctcagcgaaacgggcgacccgcggctgtctaccttcttcggtgtcatcaaggcgcttgggctgaagatttcgatagaggcggaccaagacgccgcttgaattccgtcagaggccctagatcaggcctctctctttcaccgagattccaaaccaaaggacagtcacttggccaacaagtcggtcgatcatgctttcacggcgacgagcctcaactcggcggcaacggatccgacatttgcgggagcgctgtccttcatgcgccggcgcttcaccaaggatctgaccggcgccgatgtcgtggtctggggcgttcccttcgatgccgcgacctccaaccggccgggtacgcgtttcgggccgcaggcgatccggcgggcttcggcgatcttcgacaacgatccgcaatatcccttcaatcgcgatctcttcgccgagatggccgtcatcgactacggagattgcctgctcgattacggcaaccaccaggagacgccagctgcgatcgagcgacaggcgaagacgatcgtcgatacgggcgccttcatgctgacgctgggcggcgaccattacgtgacctggccgatcctcaaggcgcatgccgccaagcacggtccgctggcgctggtgcagttcgacgcgcatcaggacacctggttcgacgacaacaagcggatcgaccacggttcctttgtggcgcgcgcggttcgcgacggcatcatcgatcccgatcgctccatccagatcggcatccgcacgcatgcgcccgacgatttcggcatcaatattctctacggccatcaggtcgaggagatgagtgcttccgagatcgcctcgacgatcatctcgcacaccaagggtgcgcccagctatctgaccttcgacatcgattgcctggacccggcctatgcgcccggcaccggcacgccggtttccggtggcccgtccagtgccaagatcctctcggtgctgcagcggctgcaccagctcgatatccgcggcgccgacgtagtcgaggtgtcgcccgcctacgaccatgccgacatcaccgccattgccggggcgacggtcgcgatgtatatgctggggctgcacgccgaacgacgcgcgacagcgtcacacggctgactcatccatcttccaaaatgattccggacttctttctaacctattgaaagtgtgagcaagacaatggcaccgaagatcttcatcgatggcgaacacggcacgacgggcctgcagatccgcacgcgcatggccggccgccgcgatgtcgagcttctgtccattccggaagcggagcgccgcaatgccgcgatccgcgaggatatgctgaacagcgccgatatcgccatcctctgcctgcccgacgatgcgtcgaaggaagccgtgcagatggtctcggccaacaacaatgtccgcgtcatcgacacctcgaccgcctatcgcgtcgacccatcctgggcctatggcttcgccgagatggacaaggagcaggcggccaagatcagttcggcgcgcttcgtcgccaatcccggctgctatccgaccggcgcgatcgggctgatgcggccgctgcgcgcagcgggcattctgtcggacggctatcccgtcaccgtgaacgcggtctcgggctataccggcggcggcaagcagatgatcgcgcagatggaagaccagagccgtgacgacgcaatcagcgcgccgcacttcctctacggcctgacgctgacgcacaagcatgtgcccgagatgaagatccacggcctgctcgaccgcgcgccgatcttcgcgccatcggtcggcaagttcgcgcagggcatgatcgtgcaggttccgctgcacctcgacatgttggcctcaggcacgacgctggagagcattcatacggcactgacggcccactatgccggccaggatatcgtcacggtcgttccgctcgctgacagcggcaagatggcgcgcgtcgatgccgtcgaacttgccggcaaggacacgatgaaactcttcgtattcggcacgcctggtggttcgcaggtcaatctcgtcgccctgctcgacaatctcggcaagggtgcctcgggtgcagccgtacagaacatggacctgatgctggcctcctgagcgaggccgggctttcatgtcgctttccggtagtgtggccgatatcggtgcgtggctcgccgccgcgctgccggatcatgggctttacaagctgatcgccattgcctgcattgccgggctcgcccgtggcttttccggcttcggggcggcgctgatctttattccgctcggtggcgccatcatcgggccgaagctgatctcgccggtgttgcttgtcatcgacgggctggcgacactggggatgatcccgccggcatggaagcgggcgaaccggcgcgaggtgttcaccatggctgccggtgcgatgctcggcgttcccgcgggaaccgccgtgctgacgctgatggacccgctgctcttgcgctggtcgatcactgtcatcgcgctgctactgcttgcgctgttggtctcgggctggcgctatcatggggaaccgcattcctatctcggcaccgctgtcgggctggtggccggattgttcagcggtgccgcccaactcggcgggccgcccgtcgttgcctactggctcggcggaaagacggagttcaccaaggttcgctccaacatcatcatctacttcgcgatctcgacctgtttcagcgtcgccagctattatgccggcgggctgttcgtcgataccgtcttcgcgctgacgctggtcatcctgccgagctacacgatcggcctgtttctcggttccaggcttttcggcttcgccaaggagagcaccttccggatcatctgctacgggctgatcggtgcctccgccttgctcggcatgcctgttctcgacggcctactgcgctaaagcggatggcgggcgggcgtggccggctttgacaccagcgcttcgcccggaccatggaccgccgcgaatagcaggccagcgaggaaggtgaagtggtcgatgaaaaagccgaactccgcctgattaccggcccaacggccaggcccatggaacgacacagcgagaaagatgacgtagacccccgccaccagcgctgccggcgaaaagaagatgccggtcaggaaggcgagcgccagccccagctcgaagaaggccgcgacccaggcgagaaagagcgggaacggaaatccggcggcggcgatgtaggcggccgtcgcctgcatatccatgaacttgaagctcagcgccatgatgaacacgccggcgaagatcagccttgcgaccagaattgcgattgtcctgcccatatctctctccctgtgccgatagcggccctatccttgaacgctccgcagcgcgattgcgccgccttatgatgcaaggacgaatgattgggcacgctcccgacatgccctcgcacaatctcctctcgtgccctgccattttgattcaagtgcttcgcaagtcgagtccggaacgcgacgcaagccgttgatttcggattccattccgcgatcggtcgcgttcatggaccgacgcggtctttatgagatttctatttgccaccgggggcgcgcgaatggatttcatacgctgtgcggccgtaggctctgatcgaaattcagaggtaaacgccatgcgagactccctatttccccaccctccagccagtcgcccccgacgccccgtggtcaagcgacagatgcgcgagaagcgcacggcgcacgtgctgatcatcttcggtctggtgcttgccgccgtcgagatctacgtcatctggggcagtatctgacacgaccatgcggatggacacacgactacgactgggaacagcgatcacggcgctggtcacgccattcagcaacgaccggctcgaccttgccatgctcgagcgactggcggagcggcagatcaactccggcatcgacggactggccgtctgcaccgtcaccggcgaagggccgacgctgtcgtcgaccgagagggcggcgattatccgcacctgcgtcagggtggcggccgggcgggtgcccgtcatcgccgcgacaggcaccaatgccacatcgaccacgatcgcgctgaccctggaagcgcgggagcttggagccgatgccgcgctcgtcaccgtgccctattattcgaaaccggggcagaagggaatcgtccaccatttcgagcaggtggcggcggcgagcgatctgcctgtcattatcgatgacagcccgtcgcgctgcgccagcagcctggcacctgaaagccttgaggcgctggcgcgtatcgagagcatcctcggcgtcgtccattcgagcggtgcggcgacccggcttgcgccgcatctgcgccggcgctttgtctccctgtcatccgatgacggcagcgcgctttcgtttctcgcttgcggcggagacggcatgctgtcgtcaggcgcgaatgtcgagccgcgcctgtttgcttcgcttcatcgctcagcgaaggcgggcaacatggcggcggccccagcgctgcgtgaccgtctgcaaccgctcatccgtgcgcttgccgaagacggctcgccggctcccgtcaaatacgcactgcatgtgctgcttggcacgtcctctgatgtccgcctgccgatggccggcctcgacgccagcgaaaaagcggcgatcttcgctgccctgacggggctcgcggagagtcgtcaccaagcgcgggcgatctaagccgcaccactccaaccatagccgcgatcacccaacatgaaaggaacaatcatgccctcctccaacgcgcgcgccctcgccgcgaccacgcatcccgagcccctgccgcgctttaccatcggtcggagcaagggcggcggatgggtggttcaggatcgcgaggggcgcgtcggcggtctgtttatcagcgagagcgccgcattgcatttcgcctccgacgaatgcgatcacgacgcgacgcagatcgcgatcacccgcacgcgtactctgctgcctttcggtcggcccgacggcggggaacatgtgcactgacgagacataacccacttcagcgggtgcgcgcgacggcgttcccgcaggcgttggcgaacgcttccttaaccgccgtttcgtatcatccggctcctccgtcacgccgagccgacacgatgccgaacaagccgaacttccgcttcactcattacgatctcaaggagcagcgcgccgggacggtgatcgaggtgaccttgaacgcggtcgccaatgtccggttgatgacgtcgccgaactatcaacgcttcacggaagtgctcgatttcaaatatgtcggcggcgtcgcgcgcaaatcgccgatccgcgtgccgatccccgacagcggccactggcatctcgtggtcgacatggaaggccatcacggccttgcggagtcgtcggtcaagatcgtcgccgctccgtccggacaaacgcgcgcgtcttgatcagcgctgattgcgctctttcctgagtttcgaccaccattcaagccgcttgcggatatcgcgctcgaagccacgctcgggcggatcgtagaaggtctggcggcccatcttttccggaaaataatcctggcccgagaaggcgtcgggctcgtcgtggtcgtagcggtagccttcgttgtagccctcatccttcatcagcttggtcggcgcgttgaggatgtgcttgggcggcagcagcgagccgttttgcttggcggccatggtggcggccttgaaggcggtgtagacggcgttcgatttcggcgcggtggcgaggtagacgcaggcctgcgccaacgccagctctccctcgggagaacctagataatcgtaagcgtccttggcggcgttgcagatgacaagcgcctgcggatcggcaaggccgatatcctcgaccgccatgcgcaccagccggcgtccaagatagagcgggtcctcgccggcgtcgaacatgcgggccagatagtagagcgccgcgtcagggtcggagccgcgcacggacttgtgcagggccgagatcagattgtagtggccgtcctgggccttgtcatagaccggcgcgcggcgctggacgatcttggtcagtccctcggtgtcgaagatctcgtcgcgacgggcggcgcgccagacttcctccgccaaggtcagcaccgcgcggccatcgccatcggccatgcgcaaaaggctgacgcgggcttccggcgtgagcggcagctccctgccctcgatcgcctcggcgcggctcaggagctcggccaggctctgatcgtcatgcgacttgaacgtcagcacgcgggcacgcgacaaaagagcggcgttgagctcgaaggacgggttctcggtggtggcgccgacgaggatgacggtgccgtcttccatcacaggcaggaagctatcctgctgggcgcggttgaagcgatggatctcgtctacgaaaagaagcgtctggcggccgtccatacggcgcagccgggctgcttcgaagactttcttgagatcggcgacgccggaaaagatcgccgagatctgttcgaaggcaagacccgcctcgcccgacagcagccgcgcgacggtggtcttgccggttccgggcggtccccagaagatcatcgatcccaacgagccgctttcgatcattcgcttgagaacaccgtcttcacctgtcaggtggtcctgaccggtgacgtcggcgatggtctgcgggcgaagccgatccgcgagcggtcgcctgttggcgacctccggcggaatgcgcggcgcgaagagatcgttgctcatcggaagaactgccggatgcgctggccgttgcgttcgatctccacacgccagaagctcggattctgggcagcgacggtggcgagttccttggtggtcttcacatccgaactgttgatggaaacgatgatgtccttgggttcgaaaccaagttgctgggccacggagccagccttcacttccgataccacgacaccggtgctctcgcttggcatgcgcagctcatcggccacgcgcggcgaaaggttttcgacgacggcgccggtgaagggcgagcggccgccgatcgtgcgctgatcgcgcggcgtcgtctcgggtgcctggccgagcgtgatcgtcacactctcctgcttgccgttgtcggtgatggcgagatcgaccgccttgccgaggccggccgtggtcaggcggtaaagcagcgcatcgggatgctccaccgcaacgccgttgacggcggtgatgacttcgcccggcttcaggccggcctttgcagccgggccgccttccgtgaccttgaccacgatggcaccgcgcgccttgccgagaccgagcgcatcggcgacgtcggaggtcaccgcatcgaaggttgcgccgacataggggcgctcgaaggtcttcacgcccgcatcggcggaagcgaggaataccttcacgagattggcggggatggcgaagccgatgccgttggagccgccgccgcgtgagaagatggcggtgttgataccgatcagttcgcccttcatgttcatcagcgcgccgccggaattgccgggattgatcgaggcatcggtctggatgaagaagccgaactcgttcttcacgacctggttacgcgcgagagccgagacgatgccagacgtcaccgtctgaccaaccccgaacggattgccgatggcaagcacgaggtcgccgacttcaacggcatcggagttgccgatcggaagcgccgggaaggtctccttcgtgtcgaccttcaggacggcgagatccagccgatcgtccgtcagaatgaccttgctggcaaactcgcggccatccgaaagcgcgatcttgatatcgtcggcgcccgcgatcacgtggttgttggtgacgatggtgccgttggcctcgacgatgacaccggagccgagcgaggactgcttctcggtacggttcggcatctgctgaccgaagaactgctcgaagaaggggtcgcccgcgaaaggcgactgacggcggacagtcttttccgcgtagacgttcaccaccgcgcccgctgtctgcttgacgagcggtgcaaaggacagctgcatatccatctggctctgcggcacggtcttgaccgtcccagcattggccgtttgggcattggcgttgatcggcagtgcaagcaccagagcaagcagcggcaaagacgcgcgcttcaacaggtcgtgcataagaatcccttcttgaaatcgtcgtgagagaacgttgtagtgccggacgctagaaaggaaagagggcagaagcatggaagattgaggcgggcagattgatgcgggacacacttgccaaacagagtcaggaacgacaggcatgcaactgatatcaaaggccaaactctgggcgaaatcactgaagcgtgacgtggtcgcgctgtggcttgccgcgcgcgacaggcgcgtgccctggtacgccaaggcggtggcgggcggcattgccgcctacgcgctgtcgccgatcgacctgatcccggatttcattcccgtgctcggctatctcgacgatctcgtgatcgtgccgctcggcatcctgcttgccgtcaggctggtcccgcccaatgtcatggcggagctgcggatggacgccgcggcgcgcctggaacggccgtccggtcgcgccgcgttggtcgtcatccttgccatctggctctgctgcatcatcttcgtcggcatggcattcttgagagccagctagaccggacaggaacccactgcatgacgcgatatcgccagcccctcctcttcaccgccacagcgcttcttctttccaccgcggggatgagccatgcggcaagcttcgactgcgaggccaaggagctgaagccggacgagaaggcgatctgcgacaaccgcgtgctcaacgacgcggatgtgaagatggtgacaaccttcgacctgttatcgggcctgctcgccatgggctcgcgcggcacgatgcaggacgagcagacggcatggctgaaaaagcgccaggcgtgcgccgcagacgtcgcctgcatccaggcagcctacgacgagcggctgaagcagctggcggaaagctacaaaaacataaaccggccgctttgaggcgaccggtttactggagcaactgacttttaatcagcaggttcagcgatcgccaagatcgcgaacggcgccacggtcggcgctggtggcgaaggcggcgtaggccttcagcgcggtcgtgacgttgcgcttgcgcttttcggccggctgccagcccttggcgtcctgatcggcacggcgggccgccagttcctggtcgtcgacgcgcaggctgatcgtgcggttcggaatgtcgatgtcgatcatgtcgccttcgcggacgagaccgatggtgccgccatttgccgcttccggagaggcgtggccgattgacagacccgaggtaccgccggagaagcggccgtcggtgatcagcgcgcaagcctttccgagacccttcgacttcaggtagctcgtcggatagagcatttcctgcatgccggggccgcccttcgggccttcatagcgaatgaccacgacgtcgccggcgacgacttcgttcgccaggatcgccttcacggccgcgtcctggctttcgtagaccttggccgggccggagaacttcaggatcgattcatcgacaccagccgtcttcacgatgcagccgtcgagcgcgaggttgcccttcagaacggcaaggccgccatccttggagaagggatgctgggcatcgcggatgacgccggtttcgcggtcgaggtcgagttcctcccaacgcgagctctggctgaaggcgacctgtgtcggaacaccacccggggcggcgctgaagagatcgaaggcggccttgttatcggtgaccgcgacatcccactgcgccagtgcttcacgcatggtcggcgcgtggaccgtcggaagatcgacattcaaaaggccagcacggtcgagctcaccaagaatggccatgatgccgccggcacggtgaacgtcttccatgtgaacgtcggccttggccggcgcgaccttcgacaggcagggaacacgacgcgacaggcgatcgatatcgtccatggtgaaatcgatctcgccctcatgcgccgccgcaagaatgtgcaggacggtattggtcgatccgcccatggcgatatcgagcgccatggcgttctcgaacgcacccttgctggcgatggtgcgcggcagagcggtcagatcgtcctgttcgtaataacggcgggcgagatcgacaacgcggcgaccggcctcaaggaagagttccttgcggtcggaatgggtggccaatgtcgagccgtttccgggcagcgacagaccgagcgcctcggtcagacagttcatcgagttcgccgtgaacatgccggagcaggaaccgcaggtcgggcaagccgagcgctcgatgacggcgacgtcctcgtcgctgatcttgtcgtcggcagcggcgaccatggcatccacgaggtcgagcgcgaccttcttgccgttcagcacgaccttgccggcttccatcgggccaccggagacgaagaccgtcgggatattcaggcgcagcgacgccatcagcatgccaggggtgatcttgtcgcagttggagatgcagaccatggcatcggcgcagtgagcgttgaccatgtattcgacgctgtcggcgatcagctcgcgcgagggcagcgaatagagcatgccatcatggcccatggcgataccgtcgtcgacggcgatcgtgttgaactccttggcgacgccaccggccgcctcgatctcgcgggcgacgagctggccgaggtccttcaggtggacgtgacccggcacgaactgggtgaaggagttgaccaccgcgatgatcggcttgccgaaatccgaatccttcatgcccgtggcgcgccaaaggccgcgcgcgcccgccatgttgcggccgtgggtcgtggttctcgaacgataagctggcattggcgttttcctcacaacatcggaagtcttcggcgaaacagaccgcgccttgaagatacggatccactctcgctgctttttggaattgtcctaatccaaagagtataaactgtcactaccgggaaaggcaaaaacggtactcctcggtacgcctccggatagcgtcgagggacggatgggacgcccatctgacgaatacgggatcggagcgcgttttgttacaggctcgggcgacgatttcgctacacaaaaagttggcttcccggccggccgcatgaaggcgtaaacagtgatccgaaacgagcttgaatgcgttcaagttcaatgccgagcctgttgctcaggaggatgccatgcccgtctatcgcccccccaagatcgccgcttcggagattaccccgcgtcaggtctatctcggtcgccgtgaattcctcggcgccgccgcgatcggtgccgtcggcctgctgggtgcgggcaatgccggcgcggccgcgctctcggccgtagagagcaagtacaaggtcgacgagaagccgaccccggtcaaggatgtgacgacctacaacaacttctacgaattcggcctcgacaagggtgatccggtggcgctgtccggcgacttcaagcccctgccctggacgatcaaggtcgacggcatggtcaacaagccgggcacgttcgatctcgacgcgctgatgaaggaattcccgatcgaaagccgcacctatcgcatgcgttgcgtggaggcgtggtcgatggtcattccgtgggacggctttccgctggcctcgctgctgagcaaggtcgagccgctcggaagcgccaagtatgtcgccttcgaaaccgtggtgcgcccggaggagatgccggggcagaagggtatcttccaatcgctcgagtggccctatgtcgaggggctgcggctcgacgaagccaaccatccgctgacgctgctcgccgtcgggctctatggagagacattgcccaaccagaacggcgcgccgatccggctggtggttccgtggaaatatggcttcaagggcatcaagtcgatcgttcggatcacgctcaccgacaaggagccgaagaacacctggcagatcaccaatccgcaggaatacggcttctacgccaacgtcaatccggccgtcgatcatccacgctggagccaggcgaccgagcggcggatcggagagagcggcttcttcggcgccagccgccgtccgacgctgccgttcaacgggtatgcggacgaggtggcaagcctctacgcaggcatggacctgaaggcgaacttctgatggcggcgttgtcgttcagcctgccgaaacgatggcattcggcttccgtctggctgctatacgtcgtcgggctgctacctgccgcctggacattctatctgggcgcaagcgaccagttgggcgccgatccggtcaagaccttcgagctgttcctcggcctgtgggcgctgcgcttcctgatcctgacgctcgccgtctcccctgcccgagacctgctcggctggaactatctgcgctatcgccgggcgctcgggcttttgtgtttctactacgtcgtcatgcatttcgccgtctacatggtgctcgatcaggcgctggacgtgtcggctgtcatcgacgatgtgatgaagcggcccttcatcatgttcggcatggccgggcttgtgctgttggtgccgctggctgtcacctccaacaacctgtcgatccggaagctcggatcgaaatggaactggctacacaagctgatctacatcatcgccgcctgtggcgcggtgcacttcgcgctgtcgacaaagcttctggatctcgagcaatatgtctatgtcgggctgatcatcctgatgatcctttatcgctcgtataggccgattgcgcgcagtcgcaagcgaggacgaaacgggcaaggcggcagaacgcgtccggcccaggctgccggctgaactcttgtttgagagcgtgaaggctggcagactactcgaatggaagcagcgtcgcctctatatatctaccgtgaccctcacttcgccccggctggcgacacagtcgttgccgcggcgccgcttgacgtcgtcgtagacgcctacggcgacggcgggcttgtcggcgaggctggcttgagcgccgcgtttggtggcgcgatcgtcttcaagaacgacctgacgggcgcctgctttctcggcatatggggaaagcgcaatgctgcgcgtttcaaggcgacgctagaggcgtatggcgatgtcgaggtcatagaaggcgcaccgcctgcgcggctccagcacttcggcaagactggcgaccggccgaagcgaactcgatgacagatcaataccacaaacgaaaacagccgggcttttcagcccggctgtcttgcttccggcgaaccggaaaaaatcaagcggcttcagcagcagctgcttcggcttcaacgcgagccttgtcggctgcgcccttggcgaaggtgtcgcggtcaacgaattcgatgacggcgagagcggcgttgtcgccctggcggaagccggccttcatgatacgcaggtaaccgccgttgcgggttgcgtagcgcgaagcgatcgtgtcgaagagcttcgaaacgacagcggcgtcgcggatctgcgagatcgcctgacgacgagcgtgcaggtcgccgcgcttgccgagggttacgagcttttcaacgatcggacggatttcctttgccttcggcagggtggtcacgatctgctcatgggtgatgagcgaagccgccatgttggcaaacattgccttgcggtggctagcggttctattcagcttgcggccggctttaccgtggcgcattgctattctccttcacatgcaggcatctcgcccgccgtttgatggttagtattggtcttcgtaacgcttggcgagatcttcgatgttctcgggcggccatgccggcacttccatgccgaggtgcaggcccatggaagcgagaacttccttgatttcgttcagcgacttgcgaccaaaattcggcgtgcggagcatttctgcttcggtcttctgaatgaggtcgccgatgtagacgatgttgtcgttcttcaggcagtttgccgagcgaacagacagttcgagttcgtccaccttcttgaggagcgccgggttgaaagcgagttcggtgactgcttcttcttcggtttccttctgcggctcgtcgaagttgacgaacacgccaagctgatcctgcaggatgcgagccgcgaaagcgacggcatcttcgccggagatcgagccatcggtttcgatggtcatgttcagcttgtcgtagtcgagaacctgtccttcgcgggtattttcaaccttgtaggacaccttcttgaccggcgaatagaggctgtcgaccgggatgagaccgatcggagcatcttccgcacgattgcgatcggccggaacatagcccttgccgttgttgacggtgaattccatgcggatttcggcgccctcgtcgagcgtgcagatcacatgctcggggttgaggatttcgatatcgccgaccgtctggatgtcgccagccgttacaacgcccggaccctgcttacgcacgaccatgcgctttgcgtcgtcgccatccatcttgatggcgatttccttgatgttcaggacgatgtcggtgacatcttcacgaacgccagggatcgacgagaattcatgcagcacgccatcgatctgcacggccgtcactgcggcaccgcgcagcgaggacagcagaacgcggcgaagcgcgttgccgagggtgaggccgaaaccgcgctccagcggctctgctacgagcgtcgccttggtgcgcgagctcgaagagaactcgaccttgttcggcttgatcaattcctgccagtttttctgaatcatatttttgccttccgttcgttgccaccatccaatcgtgacaaccgagcttgagaagcatcgggagcgaggatccgctcaccgatgttgtgaatggcgatgatcagacgcggcgcttcttgcgcgggcggcaaccattgtgcgggatcggcgtcacgtcgcggatggacgtgatcatgaaaccagcagcttggagggcgcgcagagcggattcacgacccgaacccggaccgcaaacttcaacttccagcgacttcatgccgtgttcctgggccttcttggcgcagtcttcagcagcgatctgagcggcgaacggggtcgacttgcgcgagcccttgaagcccttggcgccagcagacgaccaggcaatggcgttgccctgtgcgtcggtgatcgtgatcatcgtgttgttgaaggtcgagttgacgtgagcgacgcccgacgaaatgtttttacgttcgcgacggcgaacgcgtacggcttccttggccatttgtatccctttcttggatctctgcaccgccgtaataccagcggctacaccggaacgagaccttgcggccctgcccgaaactcaaaagaggccggcgcagaccgccagccccctcacctccggtttcccggaaattacttcttcttaccagcgatcgcctttgccgggcccttgcgggtacgagcattggtgtgcgtgcgctgaccgcggaccggaaggccacggcgatgacgcaggccgcggtagcagccgaggtccatcagacgcttgatgttcatcgaggtctcgcgacgcaggtcaccttcgacctggtaatcgcggtcgatggtttcgcggatctgcaggacttcagcgtcagtgagctgattcacgcgacgatcagcaggaataccgaccttctcgacgatttcctgtgcgaatttcggaccgatcccgtgaatgtacgtcagcgcgattacaacgcgctttgcggtcgggatgttgacgccagcgatacgtgccacgcctattctccttgcgttccagttgccatccggcaagtggtgtctcgttacacggccttgaaaggccgcaattacaattcaggttctcaacaagtcaaaacgatcgaacccggaattcctatcggaagtccgcgccgatcgcatcagatatcgcgagttggcgcggtgtttaacggaatcagtgctgaaaagcaaccgctcccgccaagttttatttccaaagccttacagcttcgaaagtatgccctcgatctcgccggtgacgcgatcgatgtctgccatgccatccaccgactgcaacttgcccttggcatagtagtagccgatcagcggcgatgtttccttgtagtaagcgccgagacgggtgacgaccgtttcgcgattgtcatccggacgacgcttgaagtgagtcgaaccgcagcggtcgcagacgccttccaccttcggcttgacatttgtgtcgtgatagccggcaccgcagttggcgcaggtgtaacggccggaaacacggtccgccagaatcttgtcgtccacctggatctcgacgaccttcgacagctcgatacccttgcccttgagcatggcttccgtcgcatcggcctgaacgagcgtgcgcgggaaaccgtcgagaatgaagccattctcgcaatcgggctggtcgatacgctccgacacgattgcgatgacgatgtcgtcagagaccagcttgccagcatccataacggccttggcgcgcttgcccacttcggtaccggcctgaacggcggcgcgaagcatgtcacccgtggaaagttgcggaatgccgtacttttccacgatccgctgagcttgagtccccttacccgcgcccggcggccccaaaagtataagtctcatcgacccctctttcctccacgcaacttcgatttcttgatcaggccttcgtactgctgcgcgatcaggtgaccctggatctgcgccaccgtatcaagagttacgctaacgacgatcaaaagcgaagtgccaccaagggataacgggatcccggtctttgccacaagcatttccggaaggatgcagacgaagacgagatagatcgcgccgacgaccgtaatgcgggtcagaacgtagtcgatatactcggcggttcgctcgcccggacggatacccgggatgaagccgccatgcttcttcagattgtcggcggtatccttcgggttgaagacgatagccgtatagaagaaggcgaagaaggcgataagcagagcgtagagaagcatgtaaagcggctggccgtgacctagcgcggcgacgatcgacgtgacccagcccggcatgttcgtggtgttcgcgaagcccgcgatcgttgccggcagcaacagaagcgacgacgcgaagatcgccgggataacacccgaggtgttgagcttcagcggcaggtgcgaggtatcgccctggaacatccggttaccgacctggcgcttcggatactggatcagcaggcgacgctgcgcgcgctcgacgaagacgatgatggcgataacgacaatcgcgaccacgatgaccagaaggatcaggcttgtcgacagcgcaccggtgcggccgagttccagcgtgccggcaagagcgctcggcaggccggcggcgatgccggcgaagatgatgagcgagatgccgttgccgataccgcgcgaggtgatctgctcgccgagccacatcaggaacatcgtgccgccgagcagcgtgatgacggtggaaacgcggaagaagatgcccggatcaacgacgaggccgttaccgctctcaagaccgactgcaataccgtaggcctgcagcgtgccgagcagcaccgtgccgtagcgcgtgtactggttgatgatctttcggccctgctcgccttccttcttcaggttctcgagcgcaggcacgacagacgtcatcagctgcacaatgatcgaagcggagatgtaaggcatgataccgagcgcgaagatcgccatgcgctgcacggcgccgcccgagaacatgttgaagaggccgagaatgccgccagactggttgctaaaggcctgagcgtaagcttccgggttgaggccgggaagcggaatgtgcgttcccaatcgatagacgaggagagctgccagtgtaaaccacaggcgcttcttgagatcctcggctttggcgaaggtcgagaaattgaggttggaagccaactgttccgctgcagacgccatgcgtatctccgcgctaccggtttcgggctctgaccaagcaaaaggcagaacgccggatcggcatttctgaattattcaaaagcgggcttcggacggattgcgggcgcaacctatgcctcaccctgttgttcgttcgaccgtcctgacgcacgtgcatccggccggctttcgtgaggctcacatatgggagcaaaaccgcccggtgtgaagcaccccgggcggtttatcatagattaaattactctgcagctgcggcagaaagaagcgtgacggaaccgccagccttttcgatcttttcgatcgccggcttggaagcgccagcaacttcgaacttgacctttgccttcagctcgccgtcggcgagaacgcgaacgccgtccttgacgcgacggataacgccggcagccttgagagccgctgcatcaaccgtggacttggcgtcgagcttgccagcgtcgatcgctgcctgaacacgctccagggacacgacaacgaagtcggccttgaagatgttgttgaagccgcgcttcggcaggcgacggtagattggcatctgaccgccttcgaagccgttgatggctacgcccgaacgggacttctgacccttgacgccgcgaccaccggtcttgccggagcccgaaccgataccgcggccgaggcgcttgcggctatgggtcgaaccttcgttgtctttgatttcattgagtttcatagcgaatactccctgcttacttctcgtcgacgatgcgaacgagatgctggacagcacggatcatgccacgaacggaaggggtatcttccagcgtgcgacgacggtgcatcttgttcagcccgagaccgatcagcgtgcgctgctggacatccggacggcgaatcgggctgccgatctgctcgacggtaaccgtcttcgcttcggtcttctttgtagccttggccatggatcagctcctcttattcttcagaagcgttaccggaagcggcacggcgagcctgaagcgttgcatacttgatgccgcgctgtgctgcgatgtccttcgggtgaacctggtgcttcagagcgtcgaaggtagcgcgaaccatgttgtatgggttcgaggaaccggtcgacttggcgacgacgtcgtgaacgccgagcgtttcgaaaacagcgcgcatcggaccaccggcgatgataccggtaccgaccttggccgaacgaagcagaaccttgccggcgccgtggcggccgtgaacgtcgtgatgcagcgtacggccgtcacgcagcggtacgaagatcagttcgcgcttggcagcttcggttgccttgcggattgcttccggcacttcacgtgccttgccgtgaccgaagccaacgcggcccttctggtcaccgacgacgacgagggctgcaaaaccgaaacgacggccgcccttgacgaccttggcgacgcggttgatcgcgaccagcttgtctacgaattcgctatcgcgctcttcgcggttctggcgatcgtcgcgcgaaccttttctttcctgtgccattgtccttttcctttttcttttgcgggtggaacggcagacaacacgaggaccgcagcagcctcccctatcgaggagcgtttgcggtccggttaaaatccggccggagcactgagctccggccggaaattcattagaaggtcagaccgccttcgcgggctgcatccgccagggccttgatacggccgtgatagatgaaggcgccacggtcgaatacgacttccttgacaccagccttggaggcgcgctcggcgacgagcttgccaacggcggcagctgccgcggtgtcagcaccggtcttcagagaaccgcgcaggtccttatcgagcgtcgaggcagccgcgagggtcttgccagcaacatcgtcgataacctgaacgtagatgttcttcgaggagcgatgaaccgacaggcgcggacggccattggccaccgacttgagatgacggcgcacgcggttggcacgacgtgcaagtgcttctttcctgctagccatttcgcgtgatccttacttcttcttgccttctttgcgaacgatacgttcgccggcatacttgacgcccttgcccttgtaaggctcaggaccgcggtattcgcggatttcagcggcgacctggccgacctgctgcttattgatgccggtgacaacaatttcagtaggcttcggcacagcgatcgtgatgccgaccggcggctcataaaccacgtcgtggctgaaaccgagagcgagctgcaggttcttgccctgaagcgacgcgcggtaaccgacgccgttgatttcgagcttgcgctcgtagccgtccttaacacccgtgaagatgttctcgatcatcgtgcgggacatgccccacttcgaacgagcatccttcgactgcgagagcggcgtcacgacaaccgcattgttttcgagcttaacgccgacttcgtcgttcgcgacgaagaagagttcgcccttcgggccctttgcagtaaccttctggccttcgaccgtagccgtaatcccagcaggaatctgaacgggcttcttaccgatacgagacatttttatatcctgtctgttcgctatggagatcgatgctcggtattagaataccgagcaaagaacctcgccaccaacgttctgttcgcgagcctggtgatcggccatcacacccttcggagtcgaaaggatggtgatgccgaggccgttcgcgacctgcggaatggacttgaccgagacataaacccggcggcccggcttggacacacggccgatctcacggatcaccgatgcgccttcgtagtacttcagctcaatgctgatttcagacttgccattgccgaaatcgacaagggagtagccacggatgtagccttcagcctgaagaacatcaagaacacgtgcacggagcttcgaagcaggcgtcgataccgacgacttgcggcgggaagcgccgttacggatgcgagtgagcatatcgcccaacggatcagtcattgtcatctaacctgctccttaccagctcgacttgacgatgcccggcaccttgccgagattgccgagttcacgcagcgcgatacgcgacatgcgcagtttgcggtagtatgcgcgcggacggcccgatacttcacaacggttgcgaatacgggtcttcgatccatcgcgcggcagggatgccagcttgatcgaggccttgaaccgctcttcgatcggaagagcctggttcatgatgatcgccttcagctcggcgcgcttagcggcctggccggcgaccttaatacggcggcgcttgttcttttcaactgcgcttgtcttcgccatgtgcggttccttttctacgctcgtcgttacggttactgacggaacgggaagttgaactctgtgagcagagcccgcgcttcgtcgtccttggtggccgtcgtgcaaacgatgatgtccatgccccacatctgatcaaccttatcgtagttgatctcagggaacacaatgtgctccttgatgcccatcgcgaagttgccacggccgtcaaagctcttcgggttcaggccgcggaagtcgcgaacgcgcggaagcgcgatgttgatcaggcggtccaggaactcgtacatgcgagcgccgcgcagggtaacctttgcgccgatcggcatatcttcgcggaccttgaagccagcgatggagttgcgtgcacgggtgatgaccggcttctgaccagcgatagcggccaggtcagctgcggcaacagtcggcttcttcgagtcagccgttgcttcaccaacacccatgttgattacgatcttgtcgatcttcgggatcatcatctcgttggcgaaggagaacttctcctgcatcgccgcgcggatccgctcgacatattccttcttgagccgcggctcgtactttgcctgagccatcagatcacctcaccggaacgcttggccacacggaccttcttgccgtcaacaaccttgaaaccaacgcgggtcggcttgccgtccttgtcgatgatcgagacgttggacaagtgaaccgaggcttccttgctgatgatgccggcttcctgggtctgcgtctggcgctggtggcgcttcacgacgttgacgccacgaaccacggcgcgatcttccttgggcagaacctgaaggacttcgccagtacggcccttgtccttgcctgcgagcatgacgaccgtgtcgcccttacgaatcttttgcatcgttcgtgctccttacagaacttctggagcgagcgagatgatcttcatgtggttcttggcgcgaagttcgcgcggaaccggtccgaagatacgggtgccgatcggctctttcttgttgtcgatgaggactgctgcattggtgtcgaagcggatgatggaaccatcaacgcgacggatttccttggcggtgcgaacgacaaccgccttcatcacgtcacccttcttcacgcggccgcgcggaatagcttccttgatcgaaacgacgataacgtcgccgatcgaggcatacttgcgcttagaaccgcccagcaccttgatgcacatgacacgacgtgcgccggaattatccgccacgtcgaggtttgtttgcatctgaatcatatcaggtcgccttcttgtgtttaccgggatggttgggctgcgccccctaccccggcatatgaaaattgtcagccggccgcttgccacgagagcaggcgaaaacacggcaatagcttgactagcgcgggatcgatcgtgccagggtggtttcccaaacgggaccttccgtgcgctcaaagcaaaagaacgctcgacgaacgagcgttctgacgctgcttcatacagaaatttccgcgagacgcaaggcctcgcgagaaattcttactttgcctggccggaaataaccgtccagcacttgtccttcgagatcggcgcgcattcctcgatggatacggtatcgccgatcttgtactgattgttttcgtcgtgggccttgtacttcttggaacgacgaacggtcttctgcatcagcggatgagcgaaacgacgctcaacgcggacaactacagtcttctcgttcttgtcgccaacgacgacgccctgcaggatgcgcttcggcatattcttaggcctttgcttctgccgccttctggcgggcaatggttttcacgcgggcgatgtccttgcgaacttcgttgacgcgggaggacttctcgagctgaccggtggccttctggaagcgcaggttgaactgctccttcttcaggtcggcgagcttgtccttgagctgatcggccgtcaggccgcgaacttcttcggctttcatgtgccttgctccttactctgcaatgcgctgtacgaagcgcgtcttgaccgagagcttggcagagccgaggcgaagcgcttcgcgagcgatttcttcgctgacgccgtcgatctcgaacatcatgcggcctggcttgaccttgcatgcccaatattcaacagagcccttacccttacccatacggacttcggtcggctttgcggttaccggaacatccgggaacacgcggatccatacacggccagcacgcttcatgtagcgcgtgatcgcgcggcgggccgcttcgatctcgcgtgcattgacgcggtttggctcctgagccttaaggccgaattcaccgaaggcgaggtcggaaccacccttggcgacgcccttgatgcggcccttgaattgcttgcggtacttggtacgctttggctgcaacattttcttattctccgaacttatctgccaccaacgctattaagcgttgtcgcggcgacgatcgcggtcgcggctagccggaccctgagcatcaccctcgagtgcgcggcgctcggaggccatcggatcgtgctcaaggatttcgcccttgaagatccaaaccttgatgccgcagataccgaaagcggtttccgcttcggctgtgccgtagtcgatgtcagcgcgcagcgtatgcagcggcacgcgaccttcgcggtaccattccgtacgagcgatttcagcaccgccgagacggcccgcgcaggtgatcttgatgccttcggcgccaagacgcatcgcggactgaacggcgcgcttcatggcgcgacggaaagcaacacgacgctcgagctgctgagcgatcgactgggcgaccagaacagcgtcgacttccggcttgcgaacttcaacgatgttgaggtgcgtttcggagttcgtcatgtccgacagcttcttgcggagcttgtcgatgtctgcgcccttcttgccgatgatcaggcccggacgagccgagtggatcgtgacgcggcacttcttgtgcggacgctcgataaccaccttggagataccagcctgcttcagttcgttcatgacgaacttgcgcatcttcaggtcttcgtgcagcagctgaccgtattcggcattgtccgcgaaccagcggctatcccaggtacggttgatgccaagacggaaaccaatcggattgattttctgacccattatgcggcctcctcggtggcggcttcaacttcgcgaacaacgatcgtgaggtgcgcaaagggcttttcgatgcgcgatgcacgaccacggccacgagcgtggaaacgcttcatgacgatcgacttgccgacgtaagcttccgctacgaccagcgagtcaacgtcgagatcatggttgttctcggcgttggcgatcgcggattcgagcgtcttcttgacggcgcctgcgatgcgcttgcgggagaattccagctcagcgagtgcgcgctcgaccttcttgccgcggatagccgcggcaaccaggttgagcttctgtgggctgacgcggagcgtgcgggcgactgcttgcgcctcgttgtccttcagccggcgttcggcttttgccttgcccatcgttacttcctctttgccttcttgtccgcaccgtgaccgtagtaggtccgggtcggagagaattcaccgaatttgtgaccgaccatgtcttcattgacattgaccggaacatgcttgctgccgttgtagacgccgaaggtgagaccgacgaactggggcaggatcgtggagcggcggctccagatcttgattacttctgcacgtccgccttcacgaaccttctcagccttcttgagaagatagccgtcaacgaacggacctttccatactgaacgagccattggagacttcctctcttacttcttacgctgatgacgcgagcgcatgatcatcttgtcggtcgacttgttcgaccgggtgcgcttgcccttggtcggcttgccccacggagaaacaggatgacgaccaccagacgtgcgaccttcaccaccaccgtgcgggtggtcgaccgggttcatgacgacgccgcggttatgcggacgcttgccgcgccatacggtacgaccggccttgccgtcgttgatgttggcgtggtcagggttggaaaccgcaccgatcgaagcaaggcaggagcctggcacgagacgctgttcgccggagttcaggcgaaggatcgccatacctgcatcgcggcctacgagctgtgcgtaggaaccagcggagcgagcgatctgaccgcccttgcccggcttcatttccacgttgtggatgatggagccaaccgggatgtactgcaggggcatggtgttgcccggctttacgtccacagccttttcagaggcgatgaccttgtcgccggcagcaaggcgctgcggagcgatgatgtaggccttttcgccgtcggcgtaggagatgagcgcgatgaacgcggtacggttcgggtcgtattcgatacgctcgaccgtgccttcgacgtcgaacttgcgacgcttgaagtcgatcatacgatacgtacgcttgtgaccgccgccgatgaagcgagccgtgatgcgaccgaggttgttacgaccgccgctcttggtcagaccttccgtcagcgccttgaccggcttgcccttgtagagcgaggagcggtcgacgatgaccagctgacgctggctcggggtcgtaggattgaatgttttcaatgccatgtttttattcctcagagaccggtggagacgtcgatcgtctggccttcagccaaagtcacgattgccttcttcacgtccttctgcttgccggcaaaaccgcggaaacgcttggtcttgcccttgcggagcagagtgttgacggccgtgaccttgacgccgaagagcgcctcgactgcagccttgatttccggcttcgacgccgtcttagcgacgttgaaaacaacctggttgttttccgataccagcgtggacttttcggtgatcgacggcgagacgatcacatcatagtggcgaagatcggtcacttgaaacgctcctctagagcttcaacggcagccttggaaagcacgagcttgccacggcgcacgatgtcataaacgttgatgccctggatcggcagaacatcgatgttcgggatgttcttggctgcgagcttgaagttgccatcaagttcggcgccgccgatgaagagagcgttggtcaggccgagcgttgcgaaggtcgaagccagcgccttggtctttgcttcagcagcaaccaggttgtcgatgatgatgacatcgtcggacttcagcttggcagacagcgcgtgacgcaggccgagagcgcgaaccttcttcggaagatcgtgttcgtggctgcgagcaaccgggccgtgagccttaccaccgccgcggaactgcggagcgcgagccgaatggtgacgagcgcggcccgtacccttctgcttgtacatcttggcgccggtgcgccatacgtcggcgcggccctttgcctggtgggtgccctgctgcttcttggcaagctgccagcggatgacgcgggcgagaatgtcttcgcggggctcgagaccgaaaatcgcgtcagaaagagaaaccttccctgcgtcttttccctcgagggtcttgacgttgaattccattggtctggctcccttacttcgcggccgacttgacggcgtcgcgcacgatgatccaggcacccttggaaccgggtactgcacccttgatcaggatcagaccacgatcttcgtcggtcgaaaccacttcaaggttctgagtcgttacgcgcgtctggcccatgtgaccagccatcttcttgttcttgaaaaccttgcccggatcctggcgcgagccggtcgaaccgtgcgagcggtgcgaaaccgacacaccgtgcgtggcgcgcagaccgccgaagccgtgacgcttcatggcgccggcaaagcccttaccaatcgtcgtgccggtgacatcgacgagctgaccggtggcgaaatggccagccttgagctcggtgccgacgtcaagcaggttgtcttccgtgacacggaattcagcgagcttggccttcggctcgacgttggcaatagcgaaattgccgcgcatcgccttggacgtgttcttgaccttcgccgtgccagcaccaagctgaaccgcggcgtagccgttcttttctactgtgcgctgggctacgacctggcagccttccatacgcagtactgttaccggaacatgttcgccggcgtcgttatagacgcgggtcatgccgaccttctgtgcaatcacacctgaacgcatcggttcaatccttccaactcagctcgagctaggctcagagcttgatctcaacatcgacaccagcggcgagatcgagcttcatcagcgcgtctaccgtctgcggtgtcgggtcaacgatgtcgaggaggcgcttatgcgtgcgcatctcgaactgctcgcggctcttcttgtcgatgtgtggggaccggtttaccgtaaacttctcgatgcgagtcggaagcggaacggggccccggacgcttgcgccggtgcgcttcgccgtcgacacgatctcgcgcgtcgaagcgtcgagaatgcggtgatcgaacgccttcaggcgaatgcggatattttggccgttcattcgacgttatccttgtgtttgttacttacgcgcccttgatcaaggcacgggttgttttattccctaaaggcggaccaccggtttcaaagatcgagagggacgtcggaaaccggcatccctatccagtcttcaggcctttcggccacctttatgttagtttcagtctgccgcttcgaaacaacgaagcagcacgcaaacagcgcttgcgcgccatgtgccgtatttctctgtaataagcaagcggctaaagccacttgcttcataataatgtcatcgaagcggccgtccctttcgagacggccgatctcaatgattactcgacgatcgaggcaacgatgccagcgccgacggtacggccgccttcgcggatagcgaagcgcagcttttcttccatcgcgatcggaacgatcagctcaacggcaaccgtgacgttgtcgccaggcataaccatttccgtgccttccggcagcgaaacgataccggtcacgtccgtcgtgcggaagtagaactgcggacggtagttcgtgaagaacggcgtatgacggccgccttcttccttcgtcaggatgtaggcctctgccatgaacttcttgtgcggcttgaccgaacccggcttgcacaggatctgaccacgctcgacgccgtcacggttaacaccgcgaaccagtgcgccgatgttgtcgccggcctggccctgatcgagcagcttgcggaacatttcaacgccggtaaccgtcgtcttcgaggtggcgcggatgccgacgatttcgacttcttcaccaaccttgacgatgccgcgctcgacgcgaccggtcacgaccgtaccgcggcccgagatcgagaacacgtcttcgatcggcatcaggaacggctggtcgatcggacgctcaggcgtcgggatgtaggcgtcgacagcggccatcagctcgcggatcgcgtcttcaccgatcttcttgtccgaatcttcgagagcggcaagagccgaacccttgacgacaggaatgtcgtcgcccgggaagtcgtaggacgacaggagttcgcgaacttccagctcgacgagctcgagcagctcggcgtcgtcaacctggtcgaccttgttgaggaacacgacgatcgccggaacgccaacctgacgagcgagcaggatgtgctcgcgggtctgcggcatcgggccgtcggcagccgagcaaaccaggatcgcgccgtccatctgtgcggcaccggtgatcatgttcttgacgtagtcggcgtggccggggcaatcaacgtgggcatagtgacggttggccgtctcatactcgacgtgtgccgtcgagatggtgatgccgcgtgccttttcttccggagcggcgtcgatctggtcgtacgccttgaactcgccgaaatacttcgtgatcgctgccgtcagagacgtcttgccgtggtcaacgtggccgatcgtgccgatgttaacgtgcggcttgttgcgctcaaacttactctttgccatttaggctctccattcttgcaagtccgcgagggacttaattcttgttatcggtcaattggtattccggtcacttctgaccggaatactttgcctggatctcggtggcgacgttcgacgggaccggcgcgtagtgatcgaaggtcatcgtgtactgggcgcggccctgcgacatggagcgcaggttgtcgacgtacttgaacatgttcgccagcggaacgttcgcgttgatgacaacagcgataccgcggctttcctggccctggatctggccgcgacgcgagttcaggtcgccgatgacgtcgccgacgtagtcttccggcgtcacgacttcaaccttcatcatcggctcgaggagctgagcaccggcttcgcgggcagcttcacggaagcatgcacgagatgcgatttcgaaggccagaaccgacgagtcaacgtcgtggaaggcgccgtcgatgagggtcgccttgacgcccagcatcgggaagccagccagcgggccggacgacagaacgctttcgatacccttctgaacgccggggatgtattccttcggaacagaaccgccgacgatcttggattcgaacttgaagtcttcgccatcggggttcggttcgaagatgatcttgacgcgtgcgaactgaccagtaccacccgactgcttcttgtgggtgtagtccttttccgtctgacgggtaatcgtctcgcggtaagcaacctgcggagcaccaacggtcgcttcgaccttgaactcgcgacgcatgcggtcgacgagaatgtcgaggtgaagttcgcccatgccggcgatgatcgtctgaccggattcctggtcagtcttcacgcggaaggacgggtcttcagcagccaagcggttgagcgcgaggcccatcttttcctggtcgcccttggtcttcggctcgatcgcgatctggatgaccggctcggggaattccatgcgctcgaggataaccggcttcagcggatcgcaaagcgtatcgccagtggtggtttccttgaggccggcgagagcaacgatgtcgcccgcgaaggcttcttcgatgtcttcacgcgagttcgagtgcatctgcagcatgcggccgacgcgctcgcgcttgtccttgaccgtgttcatgaccgacgcgcccttctcgagcttgccggagtagatgcgggcgaaggtcagcgaaccgacgaaggggtcgttcatgatcttgaacgcgagcatggaaagcggctcggcgtcgtcagcatgacgctcgatttcggcttcggtcttgaagtcgatacccttgattgccgggatgtccatcggcgacggcaggtagtcgacaacggcgtcgagcagcggctgaacgcccttgttcttgaaggcggtgccgcagaacatcgggtggaacttgacgtcgatcgtgccgcgacggacgagcgcgcggatctgatcgttgtcgggcatggtgccttcgaggtaggcttccatcgcggcttcgtcgatctcgacaacggtctcgatcagcttttcgcgatattcggcagccttttccttcaggtcgtcagggatttcgacgacgtcccactgagcgccgagcgactcgtcgcgccagatgagagcgttcatctcgatcaggtcgacaacgcccttgaactcggactctgcgccgatcgggagctgcatgacaaccgcggtggcgccgagacgggtcttgatcatttctaccgagcggtagaagtcagcgccggtcttgtccatcttgttgcagaagatcatgcgcggaacgttgtacttctcagcctgacgccagacggtttccgtctgcggctctacgccggcgttggcatcgagaagggcaacagcaccgtcgagaacgcgcagcgaacgctcgacttcaatggtgaagtcgacgtggccgggggtgtcgatgatgttgaagcgacgcatcttgccgtcgcgacccttccagaaggtcgtggtcgcagcggacgtgatcgtgatgccacgctcctgctcctgctccatccagtccatcgtggcggcgccatcgtgcacttcgccgatcttgtgcgacttgccggtgtagtaaaggatacgctcggtcgtcgtcgtcttgccggcgtcgatgtgcgccatgataccgaaattacggtagtcttcgattttatattcgcgagccataatggactgcctttcgggaaccgttcgggattaccagcgataatgcgagaacgcacggttggcatcagccatcttgtgcgtgtcttcgcgcttcttgacggcgctaccacggttgttggatgcatcgagaagttcgccggaaaggcgatcgaccatcgtcgtctcattgcgcttgcgggcggcagtgatcagccagcgaattgcgagggcctggcgacgctcgggacgaacatcgaccggaacctggtacgtagcaccaccaacgcggcgcgaacggacttctacgtgcggagcaatgttgtcgagggcggcatggaaaacaaccagcggctcctgcttcgacttgctcgctacggagtcaaatgcgccgtaaacaatgctttcagcgacggacttcttgccgtcaagcatgatcgcattcatgaacttggtgacgatgagatcgccgaacttcgggtccgggttgatctcgcgcttttctgctctgtgacgtctggacatacttctcgtctcttaaccgttaaggcgctttatcacgcggaggacctcacgcagcgccgaatttacaaaagtccgaattacttcggacgcttcgcaccgtacttggagcggcgctgcttgcggttcttgacaccctgggtatcgagaacgccgcggatgatgtggtaacgcacacccggcaagtcctttacgcggccgccacggatcatgacgacagagtgttcctgcaggttgtgaccttcgccaggaatgtagccgatgacttcgaagccattggtcagacggatcttggcaaccttacggagagccgagttcggcttcttcggggtcgtggtgtagacgcgggtgcaaacaccacgcttctgcgggttttcctgcagagcaggaaccttgttacgctttacgtttggctggcgcggcttgcggatcagctggtttacggtaggcattcaaccatcccttacgtttaaatctcaaacccttgcgggcgtaactcacgccgtctccggcaagatcacacgcctgtctcaatgcgcaaaacgtggcccgatctgttttagcagatggaccacaaagagcagaggacgcaaaagaaatgcgtcatgcgtgcaggcaacatatcttcaacgtgcgtttcgaaccttgtttgaggtgatatcgagggcgtgtcgccccagatggccatgcctcacatgggttccgatggcgcgggtactactggtttcccgtcgtctcgtcaaggctgttaacaaataatcttcccgggaaggccttgaaacgcggcctttcagccctcgcccggaccttttagacaaaatcgcgtgcggtggccaagataaacttgggcattgcagcgaaagcggctaaggaatcacagattgcacaggccaagtgcctgaaatgagattcaaatctcgaatcgaaggacgaagaatgattaccagccccgacaacgacaacaacaacgaaggcccgatggtcttcatcatcatcggcaagggatacgaaaccgatggcggcgaaggcgtcgatctgcacatcatgctgaaggcggccgacgacgacagcgcggttcgcgaggcgctgaacgcgttgtcggaggagggtttcatcgaggccgacctggaccagatcggcatgctgaccgacattccggaagaagagccgcacgcatccgcctacaagggcgcggtcgaaggcgaagtcgcgatcatccgcttcagctgagcccgagatgatggagccggatgcgctgaaggtgctgatttacgccacttcgggcgaccggcttctcgttttcgacgaaccggactttcccgacgtgctctggcaggtgccgggcggaacggtggaacccgaagaggatgtggccgaggccgccgtccgcgagttcgtcgaagagaccggattgacgccgcccaatcccctcattccgcttgccgtgcacgactaccggttttcgctgaagaccggcggtatcatatggcatcgccggcactactatcatgtcgagctcgttgacggccatgccgagacatggctgcatcatgaactgacgccgttcagcggcggcgaccccatccagtttcgcttcttctggatcgacttcgcgcaagcgaaagcccggctcggctacggcatggaacactgcctgccgatgatcgactgatcgccgcgccctccccgctcccgacttcgacggcctgaaacgacaaaaccgcccggatcgctccgggcggttttcaattcctgatacctggtcctgggaccgggcgccgattactcggcggccggtgcgctttcgccagccagatcctgaagcatcggggtcgcgacatcggcgcccgtgcccttgcggcgttcctcgaggatcaactcgtcgcgcgacgtcgcgatacggcggatctgggtcatcgtgccaccggtaccggccgggatgaggcggccgacgatgacgttttccttcagaccctgcaggccatcggtcttgccggcgatcgccgcttccgtcagcaccttcgtcgtttcctggaaggacgcggcggagatgaaggacggcgtctgcagcgatgccttggtgatgccgagaagaaccggctcgccataggcaggcttcttgccctgttcgatcaggccgtcgttgacgtcctcgagctcgatacggtcgatgttgtcgccgacgatataggtcgagtcgcccgcatcggtgatttccaccttctgcagcatctgacggacaatcacttcgatgtgcttgtcgttgatgacaacgccctgcaggcggtagacttcctggatttcgttgacgaggtacgaagccagagcttcgacgcccttgatcgccaggatgtcgtgcggcgcggggttaccgtcgaggatgtagtcacccttttcgatatagtcaccttccatcagatggaacggcttgcccttcgggatcaggtactcgaccggctcgacaccgtcttccgccggctcgatgatgacgcgacgcttgttcttgtagtcgcggccgaggcggatcgtaccatcgatctctgcgatgatggcgtggtccttcggacgacgagcttcgaacagttcggcaacacgcggcagaccaccggtgatgtccttggtcttggcgctttccagcggcgaacgtgcaagcacgtcaccctgggaaaccttctgaccgggctcgaccgacaggatggcgtcaaccgagagctggaagcgggcatcggcaccgcgcggcagcttcatgacgctgccgttggcatccatgatgacgatcgacggcttgaggtccgaaccgcgcggggtcgagcgccagtcgataacctgacgcttggtgatacccgtggattcgtcggtcgcttccagaacggagagaccgtcgaccacgtcctcgaactgaacgatacccgagacttccgtcatcatcggacgggtgtacggatcccactcggccagacgctggccgcgcttgaccttgtcgccgtcatcgacgtgcagcttggaaccgtaggcgacgcgctgcgaagagcgttctacgccacgctcgtcgagaatggtgaccgccatgttgcggcccattgcaacgagaacgccgtcagagttgcgcagcaggttgcggttcttcatctgcacggtaccttcgtacgatgcttcgaggaacgactggtcgaccacgttcgccgtaccaccaaggtggaacgtacgcatggtgagctgcgtgcccggttcaccgatcgactgcgcggcgatgacgccgacggcttcgcccatgttgaccggtgtaccgcgagcgaggtcgcggccgtagcagatcgagcaaacgccggtctgaacttcgcaggtcagtgccgaacggatacggatcgactggataccagccttctcgatctcgatgacatcgggctcgaggatcatcttgccggcatcgacgatacgttcgccggtaaccggatgatcgatatcgtcaagcgccgtacgaccgagaacgcgaacaccaatcgacgccacgacctgaccggcatcgacgatggcggtcatggtgaggcccttgtcggtgccgcaatccacgaggttgacgatgcaatcctgcgcgacgtcgacgagacgacgggtcaggtaacccgagttcgccgtcttcagagcggtgtccgcaagacccttacgggcaccgtgggtcgagttgaagtactcgttgacggtcagaccttccttgaagttcgacgtgatcggcgtctcgatgatttcacccgacggcttggccatcaggccgcgcatgccgcccagctggcgcatctggttcggagaaccacgggcaccggagtgcgacatcatgtagatggcgttcatcggcttctgacgaccggtgctcgggtcgaactcgacagccttaatgcgggccatcatgtcctcggcgaccttttcggttgccttgccccaggcgtcaacgaccttgttgtacttctcgccctgagtgatcaggccgtcgttgtactgctgctcgtattccttgaccaggttttcggtgtcgccgacgatcttcgccttcgagtccgggataaccatgtcgtccttgccaaacgaaatgccggcgcggcaggcgtgggtgaagccgagctgcatgatgcggtcgcagaaaatgaccgtgtccttctggccgcaatggcggtagaccgtgtcgatcatcttggagatgttcttcttggtcatttcctggttgcagatgtcgaaggtcaccttgccgttcttcggcaggagttcgccgatgagcagacggccaggggtcgtttcatagatcttcgagtagggcttgccatcctcgtcgatcgacttgaagcggccgcggatcttggagtgcagcgtcacgaccttgttttcaagcgcgtgatgcagctcgccgaggtcggagaaggccatgccttcgcccggctcgttctggttcatgatcgcgaggtagtacaggccgagaaccatgtcctgcgacgggacgatgatcggtgcaccgtttgccgggtgcaggatgttgttcgtcgacatcatcaggacgcgggcttcgagctgggcttcgagcgacagcggcacgtgaacggccatctggtcaccgtcgaagtcggcgttaaaggccgtgcagacgagcgggtgcagctggatggccttgccttcgaccaggatcggttcgaaggcctggatgcccaggcggtgcagcgtcggtgcgcggttcagcagaaccggatgctcgcggatgacctcgtcgaggatatcccagacttccggcttttccttttcaaccagcttcttggcctgcttgacggtcgaggaataacccttggcgtcgaggcgggcgtagatgaacggcttgaacagttcgagcgccatcttcttcggcaggccgcactggtgcagcttcagttccggaccggtcacgatgaccgaacggccggaatagtcgacgcgcttgccgagaaggttctggcggaagcggccctgcttgcccttgagcatgtcggacagcgacttcagcggacgcttgttggcgccggtgatgacgcggccacggcggccgttgtcgaacagcgcgtccacagattcctgcagcatgcgcttttcgtttcggatgatgatgccaggagcgcgcagttcgatcaggcgcttcagacggttgttacggttgatgacgcgacgataaagatcgttcaggtcggacgtcgcgaaacggccgccatcgagcggaaccagcgggcgcaggtccggcgggatgacaggaacgaccttcatgatcatccattccgggcgattgccggattccatgaagttctcgacgatcttcaggcgcttcatcagcttcttctgcttgagatccgacgtcgtgtcggccagatccgagcgcaggtcgcccgcgatcttctcaaggttcatcgatgccagcatttcgaagatggcttcagcgccgatcatggcggtgaactgatcttcgccgtactcgtcgacggcaagcatgtattcttcttccgtcaggagctggtgctccttgagcgcggtgaggcccggctcggtgacgatgtagtgttcgaagtagagaacgcgctccacatccttcagcgtcatgtcgagcaacgtcgagatgcgcgaaggaagcgacttcaggaaccagatgtgggcaacgggagcggcgagctcgatgtggcccatgcgctcacggcgaacgcgcgacagcgtgacttccacgccgcacttttcgcagatgatgcccttgtacttcatgcgcttgtacttgccgcacaagcattcgtagtccttgatcggtccgaagatgcgggcgcagaacagaccatcgcgttcaggcttgaacgtacgatagttgatcgtttccggcttcttgatctcaccataagaccaggagagaatcttctccggagacgcaatcgagatccggatggaatcgaaattctgcgcaggcagctgcggattgaaaagattcatgacctcttggttcatgcctgtctccttcatgggctgaaagccctcaaactgcgatggtcagcggcaaatcccgggcgccgcgccatggcgaaaaacgacaataaccgcagaatgcggcgaaatcgtcccttcccggccaacacgttacggggccagagctgggacggtgcgcgctacatggcagcgcgcaccctatcaggtggttactcggcggcgtccggcaactggccggtctgctgctcgtcaaccttcgagttctcgagctcgacggagagacccagcgagcgcatttccttgacgagaacgttgaagctttcgggaatacccgcttcgaacgtatcgtcgccacggacgatggcttcgtagaccttggtacggccggcgacgtcgtcggacttgaccgtgagcatttcctgcagcgtgtaagccgcaccgtatgcttccagagcccagacttccatttccccgaagcgctgaccgccgaactgcgccttgccgcccagcggctgctgggtaacgagcgagtaaggaccgatcgaacgagcgtggatcttgtcgtcgacaaggtggttcagcttgatcatgtacatgtagccgacggtgaccttgcggtcgaagggctcgcccgtgcggccgtcgtacagaaccgactgaccgctttcgtgcagacctgccttcttcagcatcgatgcaacgtcgggctcatgcgcaccgtcgaagaccggcgttgcgatggagacaccccggcgggactgttcggccagcttgacgagcgcgtcgtcgtcgaagtgggcgacttcatccttggcctgcgaagcgtagacatccgtcagctctgtcttcaggtcggtgatgtccatcgtcttgcggtattcgtcgagcagctcgccgatcttcttacccatgccggcgcaagcccaggcaaggtgggtttcgaggatctggccgacgttcatgcgcgaaggcacgcccagcgggttcaagcatatgtcgacatgcgtgccgtcttcgaggaacggcatgtcttcgacaggcacgatacgcgagacgacgcccttgttaccgtgacggccggccatcttgtcgcccggctggatcttgcgcttcacagcgacgaagaccttgaccatcttcatgacgccaggaggcatttcgtcaccgcgctggaccttctcgaccttgtccatgaagcgctgttcaaggcgcgacttggattcgtcgtactggccacgcagagcttcgagctcggactgaaccttctcgtcctcgacggcgaacatccaccactgcgagcggggatattcggaaacgacggcgttcgaaagctcggtgcccttcttgaagcccttcgggcccgcgatggcgacctggctacgcagcatgtcgatcagacggccgtagacgttacggtcgaggatcgcctgctcgtcgtcgcggtcttttgcaagacgctcgatctcttcgcgctcgatggccatcgcgcgctcgtccttttcaacgccgtggcggttgaaaacgcgaacttcgacgatcgtgccgtaggtgcccggaggcatgcgcatggaggtgtcgcggacgtcggacgccttttcaccgaagatggcgcgcagaagcttttcttccggcgtcatcgggctttcgcccttcggcgtgatcttgccgacgaggatgtcgcccggctgaacttcagcaccgatgtagacgataccggcttcgtcgaggttcttcagcgcctcttccgagacgttcggaatgtcgcgcgtgatttcttccggaccaagcttggtgtcgcgtgccatcacttcgaattcctcgatgtggatggacgtgaacacgtcgtcagcgacgatgcgttccgacatcaggatcgagtcttcgtagttgtaaccgttccacggcatgaacgcgacgagcgcgttgcggccgagtgccagatcgcccaggtccgtcgacggaccgtcggcgagaatgtcgccgcggttgacaacgtcaccgacggtgaccagcggacgctggttgacgcaggtgttctggttcgaacgctggaacttctgcaggcggtagatgtcaacaccggacttgccggcatcgaggtcttccgtcgcgcggataacgatacgcgtcgcgtcgacctggtcgaccacaccgctgcggcgggcgccgatggcagcaccggagtcgcgggcaacgatcggctccatgccggtgccgacgaacggagcttcggcgcgcagcagaggcacggcctgacgctgcatgttcgagcccatgagagcgcggttggcgtcgtcgttttccaggaacgggatgagagcggctgcgaccgaaacgacctgcttcggcgaaacgtccatcaggttcatgctgtcgcgcggagcgagcataacttcgccggcatgacggcaaacgacgaattcgtcgacgaacgagccgtcggtgccgagttcggcgttggcctgagcgacgtaatacttcgcctcttccatggcggagaggtaaagaacgtcgttcgtcaccttgccatcgacgatgcggcggtacgggctctcgatgaagccgtacttgttgacgcgcgcgaaggtggccagcgagttgatcagaccgatgttcgggccttcaggcgtttcgatcgggcaaatacggccgtagtgggtcgggtgaacgtcgcggacttcgaagcccgcgcgctcacgggtcagaccacccgggccaagagccgagagacggcgcttgtgggtgatttccgaaagcgggttcacctggtccatgaactgcgacagctgcgaggagccgaagaattcgcggacggcagctgctgccggcttggcgttgatcaggtcctgcggcatgaccgtgtcgatttcgatcgaggacatacgttccttgatcgcgcgctccatgcgaagcaggccgagacggtactggttttccatcagctcgccgacagagcgaacacgacggttgccgaggttgtcgatgtcgtcgatctcgcccttgccgtcgcgcagttcgaccagcatcttgaccacggccaggatgtcgtccttgcgcaggacacggacggtgtcttcgacttcgaggtcgagacgcatgttcatcttgacgcgaccaacggccgacaggtcgtagcgctcagcgtcgaagaacagcgagttgaacatcgcttcggccgattccatggtcggcggttcacccggacgcatgacgcgatagatgtcgaatagggcgtcctgacggttctcgttcttgtcggcgttcagcgtgttgcggatgtaggcgccgacattgatgtggtcgatgccgagaaccgggatctcttcgaagccgtgcgacaggatgacggcgagcgacttctcgtcgatctcgtcaccagcctcgaggtagatttcacccgtcgagtagttgacgatgtcttcggcgagatagttgccgtacagatcttcgtcggtcgcctgcagagccttgaggcccttttcggacagctgacggagcagacgcggggtcagcttcttgccgccttctacgacgacttcgccggtgtcggcgtcgatcatgtcgctgatcgtcttcgcacccttgagcgtctcgggcgtaaacggaatgcgccagcccttgccgtcacgaacatagtcggacttggtgtagaaggtcgacaggatttcttcgccatccatgccgagcgccatcagcagcgacgttaccggcagcttgcggcgacggtcgatacgggcgtagacgatgtccttggcgtcgaattcgatatcgagccaggaaccgcgatacgggatgacgcgcgcggcaaacagaagcttgccggacgagtggctcttgcccttgtcgtgatcgaagaacacgcccggcgaacggtgcatctgagacacgataacgcgctcggtgccgttgacgatgaacgtgccgttgttggtcatgagcggcatgtcgcccatgtaaacggactgttccttgatgtccttgatcgacttcgcgcccgtatcctcatcgatatcgaatacgatcagacggagagtaaccttcagcggcgcggcgtaggtcaggtcgcgctggcggcattcatcgacgtcgaacttcggcggctcgaactcgtaggacacgaattccagcatggaggcgccggagaaatccgtgatcgggaatacggacttgaaaaccgactgaaggccctcgtcagggcgaccgcccttgggctcttcaaccatcaaaaactggtcataggacgccttctgaacctcgatgaggttcggcatctccgtgacttctgggatcttaccgaaaaacttgcgtacgcgcctacgaccattgaacgaaagggtctgagccatcgtcgctccttcaaaattgcatccgggcctgcaacggacgggaaccgatggccagtcgaccccgtcaaccaatgtgtgcttcaaactcgtctcacttcccgaaatcacgaggccggattgcctgcgcgtctcggttcgagaccatcctcttgaagaacccattacccaaaagccgttttcacgcggcttttgggtaattcgttccggaaaacggcaaatgggaggccggaaacccagcctcccagatgcagttcaagattacttaacgtcgaccttagcgccggcgtcttcaagcttcttcttgatgtcggcggcttcagccttggaaacgccttccttgacagccttcggagcggcttcaacgaggtccttggcttccttgaggccgaggccggtgatgccacgaacttccttgatgacgttgatcttgttagcgccggcgtcagccaggataacgtcgaactcggtcttttcttcttcagcagcagccggagcagcgccaccgccagcagcagcaactgctaccggagcagcagcggaaacgccccacttttcttcgagaagcttggacagttctgcagcttccagaacggtcagcgaggacaggtcgtctacgatctttgcgagatcagccattgtatcaattccttatgttcggttcgaaccggttgtttataaacagcaaaaaaccgccttatgcggcttcgtccttcttggcgtaagccgagaacacgcgagcaagctggcttgccggtgcctgaacaacgcctgcgatgcgggtagccggagtctggatcatgcccagcagcttcgcacgcagttcgtccaacgaaggcagggtcgcgagcgacttgactgcttccgcgttgagcgtcgttgtccccatggcgccgcccaaaacaacgatcttatcgttggtcttggcgaaatccacgacgactttcggagcggtgatcgggtcattgctgtatgcaatgagcgtctgaccgttgaagagaccagagatcccttccgcttccgtaccctgaagggcgattttggccaggcggttcttcgcgactttgacggtaccgccagctgcgcgcatcttggaacggaagtcgttcatctgcgcgactgtagcaccagcatagtgggccacgacaaccgagcccgaagccttgaagacttcgttcagttccgtgacgaattcgcgtttttccgctctttccactgcctatctccagtagatgagaccgtgaccggccccatcgggttgcctttgcctcccgagatcacgaatgatcccaagcgacgcttgaggatcctgtcccctcgcgctccgcgccagaaaggctaagaggcacaaggcatccaaggttcgaaccaaatcgatgaagcggagcttcaaaaattcgggccttacccgtctcatgcaggccaagtgattaagggaaaaccacctgcaatctcggacaggattccggatttctccggaatattccggccccttgcgaggccggaattcttgagccgggctgacgcccggcgaaacttgattaagcggccgtgaccgaagcgacttcgatcttgacgcccgggcccatggtcgaggagatcgctacgcgcttgacgtagttacccttggcgccagccggctttgccttgatgacggcgtcagcgaaggccttgatgttttcttcaagagccttggcgtcgaacgaagccttgccgatgccggcgtggacgataccagccttctcgacgcggaactcgacagcgccgcccttggaagccttgacggcgccagcgacgtccatggtgacggtgccaaccttggggttcggcatcatgccacgcgggccgagaaccttaccgaggcgaccgacgagcggcatcatgtccggggtcgcgatgcagcgatcgaaatcgatcttgccgccctgaacgatctcgacgagatcttcagcgccgacaacgtcagcaccagcagccttggcttcgtcagccttggcgccacgtgcgaagacggcgacgcgaacgtcacggcccgtgccgttcggcaggttgacaacgccgcgaaccatctggtcggcgtgacgcgggtcaacacccaggttcatcgatacttcgacggtttcgtcgaacttggcgacagcccgttccttgaccatgctgatcgcgaggtcgagagcgtagagcttcgtgggatcaacaccttcgttgatcttcttggtgcgcttgcctgccatggtcttatcctaccacttccaggcccatggcgcgggcagagccctcaatcatcgccattgcaccttcgatatcagctgcgttcaggtccttcatcttggcttcggcgatcgtcttgatctgagccttggtgagcttgcctgcggtggcgcccttgccgggcgtcttggaaccggacgtgatcttcgcttccttcttcagccagtagctgaccggaggctgcttcatgatgaaggtgaaggacttgtcctggtagtaggtgatgacgaccgggatcggcatacccttttccatttcctgcgtagcggcgttgaacgccttgcagaattccatgatgttaatgccacgctgaccaagcgccgggccgattggcggggacgggttagccgatcctgccttgacctgaagcttgagctggcctgcaactttcttagccataactctctgcctttcactgacggccggttgcccggccaataatgccggacttctccggcggctgcggttgcgtggttcggattttgggacccggctaaggcgccctcaccttccacgcgctttgcggccttcgccgcgaggacataagccgttgccggcctacatccgagctcagaccttctcgacctgagcgtattccagttcgaccggcgtcgcgcggccgaagatcgacacttccaccttcaggcgcgaacgctcctcgtccacatcctgaaccgtgccgttgaacgatgcgaacggaccgtcggaaacgcggacctgctcgccgatctcgaagctgaccgaagacttcggacgctcgacaccctcctgaacctggccgagaatacgctcggcttcggaatcagggatcggaacgggccgattgtcggaccctaggaagccggtcaccttcggcgtgttcttgatcaggtggtaggcttcgtcggtcaggttggcgcgaaccatcacataaccggggaagaacttgcgctcgctgtcgaccttgcggccgcgacgcacctcaaccaccttttcagtcgggacgagaatcttctcgaagagatgctcaagacctttctgacgggccttgttctcgatgtcttccgcgaccttcttctcgaaattcgaatacgcgtggacgatataccaacgtgccgccatcttatatctccaaccgatcagttgccgaaactgagcacgaagcccagcaaccagccgatcaactggtccgcggcgaaaaagaacagcgcggcaaagacaaccatcacaagcaccatgatcgtcgagatcatcgtctcacggcgcgacggccaagtaactttcaacgtttccgcgcgaacctgccggataaacgtaagcggatttgttttggatgccatcgactgcccacgcaattacggcgcgtaaagctgatcatatcagccccacgcaccgcgtgtctgttgaacccctacataaacaccgattccccattagacaagaggggaaccaaagtttaacgaaattagccatgtacgagcctcttgcgaaatgctgcaggatatccgcgctgttcgttcaaggaaatggcaggggcagaggggctcgaacccacgacctgcggttttggagaccgccgctctaccaactgagctatacccctttacgcttctcaatcagcctgttggcgaaagccgtcaggcgttttcgagaagcatggcgcaccctttaagacgccggaacgagattggcaagtgcgattttcactttttcccattcctggcatcggcgccgaacgcgttcacactttcacataccgacgccagtcgtgctcctcgcgaaagcccagcacttccctgatcttgcggttcgacagaaggctttcgaattcgccgatttcacgggtaaacctgacgttcggatagtagcgcgcggcgagctcgcgcgtgggcgtgttggccgaaaccgtatcgttggcggcgttgaacacctgaaagccgagaccgtccttttcgatgcagagatggcaaatctggccgagatcgcgcgcatcgatgtagctccaggcgatccgcttgcgcatttcgggattggcgaagtaggtcgggaagttctcgtattcatgcggctcgatgacgttgcctattctcaacgcgtagatgtcggcgccggagcgctcggcgaaagcccgtgccgtcttctcgttcagcaccttcgacaggccgtaggaatccatcggattgacgtcgtagtcctcatccagcggaaactgatggaaatcacggtgtccctcggcgaagcagacgccataggtggtttcgctggaggcaacgacgatcttgcgcacgccgagcttaaccgccgcctcgatgacattataagtgcccatcgtgttgatgcggaaggtttcgttgtctggcttgatcagaatgcgcgggatggccgcgaagtgcacgacggcatcataggggcgaacgcccctgcccgcttccagatcggggaagtcgcggtgcatggagagcgcattatagacctggccgctatcggtgatatcgacgatcaggttggtgacgccggggctgtcgagcggcacgagatcgatgttgtgaacctcgtatccggcattgaccagccaaggcacggcatgacgccccgccttgccggacccacccgtaaacagaatgcgcttcttcatgaaatatcctcctccgtggagttgggatagataaggtctttgagaatgagcgcaagacaacaaaagaaaaggccccaccgtttccggtagggccttcagaccgctgacaaaccctcctagggttcgtcccgagtgtcagattcacggaacgtctctaaatcaaaaagagaacggatcggaatcaaacaagttgtgctgcgaccttgaaagggtttgtcagcagtctgaaggccccaccgtttccggtagggccttctttatatctgggtaatcctagggattactcgacgatcgaggcaacgatgccagcgccgacggtacgaccgccttcgcggatagcgaagcgcagcttttcttccatcgcgatcggaacgatcagctcaacggcaaccgtgacgttgtcgccaggcataaccatttccgtgccttccggaagcgaaacgataccggtcacatccgtcgtgcggaagtagaactgcggacggtagttcgtgaagaacggcgtatgacggccgccttcttccttcgtcaggatgtaggcttctgccatgaacttcttgtgcggcttgaccgaacccggcttgcacaggatctgaccacgctcgacgccgtcacggttaacaccgcgaaccagtgcgccgatgttgtcgccggcctggccctgatcgagcagcttgcggaacatttcaacgccggtaaccgtcgtcttcgaggtagcgcggatgccgacgatttcgacttcttcaccaaccttgacgatgccgcgctcgacgcgaccggtcacgaccgtaccacggcccgagatcgagaacacgtcttcgatcggcatcaggaacggctggtcgatcggacgctcaggcgtcgggatgtaggcgtcgacagcggccatcagctcgcggatcgcgtcttcaccgatcttcttgtccgaatcttcgagagcggcaagagccgaacccttgacgacaggaatgtcgtcgcccgggaagtcgtaggacgacagaagttcgcgaacttccagctcgacgagctcgagcagctcggcgtcgtcaacctggtcgaccttgttgaggaacacgacgatcgccggaacgccaacctgacgagcgagcaggatgtgctcgcgggtctgcggcatcgggccgtcggcagccgagcaaaccaggatcgcgccgtccatctgcgcggcaccggtgatcatgttcttgacgtagtcggcgtggccggggcaatcaacgtgggcatagtgacggttggccgtctcatactcgacgtgtgccgtcgagatggtgatgccgcgtgccttttcttccggagcagcgtcgatctggtcgtacgccttgaactcgccgaaatacttcgtgatcgctgccgtcagagacgtcttgccgtggtcaacgtggccgatcgtgccgatgttaacgtgcggcttgttgcgctcaaacttactctttgccatttgaatgcttcctgtgaacgaaatggatgaccccggcgaaccggtttagtgccgccgtttaaggctttcggcggaattgcgcaagacttaattgcggacgctattccgcactggcgccgcatatgggaacgaagcattcgatcggcaatatataagtgtgtcggcacctgcgcgatttcaccatgaaccgccacaagcgattgatgctgtgatattacttgccttgccggagccacgccggcgatcgcccgggggagtacggcatggaaccgaaggatatcgcgaaacgatcggccggcaattttctgatctttgccggctgcgcattcatattgtggatactggcggccgcggtcgaccggatcgcccagatcgtgcggctctcgacgcccgagcggctgccggcgctggccgcctccatcgtcagctcgtcgacgctgcaggcgatcgtcgccatatggctgctgacggcggccgtcgccatcgcgtttccaagggttctcaggccgctgtcgaccacgacgacgctgatgttcgatgtcggctacggcatactcggcgcgctcaccggcttcggcatcgcgatcgggcttttcggcggcgggtggtcgatcctgttgcgcgcgctcatttacagcgccgtgatcgccgtcggctatgtcgccgtgcgcaaatggttgtcgcgggacgaattcacgatggatgggcgcacacgctggatggcggccggcatcatcgcgctcgcctcccccttcgtcttgctctggggctgagatcagtcgcagtgcgtcagcgcgatacggaaacgcaaacaggcgcttgcgcgttgtggataatgtcagacttcgacttggaaagtggagcgggtagcgggaatcgaacccgcgtattcagcttggaaggctgctgctctaccattgagctatacccgcggggtttggtccgatccgaggacgaatggtggagagagttggatttgaaccaacgtaggtgaaaccaacggatttacagtccgtcccctttaaccactcgggcatctctccagtttttcgtccggatcgttagaccaagtctgctagactttcgaagcgttgccgcccctcggtctgcgccgcgtatatgacgggccgagctgcctatgtcaacacgatgacgatggaaaatatgtgaaaaatgtcatcggcggcggaaaggccctgtgcacaaagaaatcctatgcggaaagaaacaccaccgctataaagcggcatgagcaaagacaacaaaaccgggggcacgccctccgacgagaaatccgccaaggatacgcactacgccaatctgcgtcgtgcgcatcgcgacaacaagcgcgaacgcggcgaaattccaactcccggcttccagaaacggaagcgtggcggcgacgactggaagccgccgacgctggcgcccgaccaggtccatctctatggcctgcacacggtgcgcgcggcgctcgaaaacagagagcgcaagaagataaagctgtcggtgacgccgaacgcgctggcgcgtctggaggtcgatgtcgagacactcggcatcccggtcgagatggtttcgccgcaggatctcgacaagatgcttggccccgacgccatccatcagggcgtgatgctggaaacgcgccccctgcccgtccgccgcctcgaagcgctgaaggacagcccgctgatcctggtgctcgaccaggtgaccgatccgcacaatgtcggcgccatcatgcgttcggccgtcgccttcaatgccggcgcgctgatcaccacgcagcgccacagcccgaccgaatcgggcgtgctcgccaaatccgcctccggcgcgctggaactcatcccttatatccagatcaccaatctcgccgatgcgctcggcgaactgcacaagctcggcttcgtcactatcggacttgattcggaaggcccggcacctcttgaaggtaccttctccggcgacaaggtcgcgctcgtgcttggcgccgagggcaaggggctgcgccagaagacgcgcgagaccgtgaatgcactggcgcggctcgatatgccgggtgagatcaagtcgctcaacgtgtcgaacgcggccgctatcgcgctctatgcggcgcgtattcatttgaaaggctgacaggctcatcaccgcgcctccggatgccgatgccgccggctgatcgtcaactgcctcggttttgacgtcagcggcggttattgtcccgcaatgctccgaccaacaaggagaagcagcagacatggcagttcgtcccctcgtcatcggcattctcttcatcgggatcctcgtcgccatcattctcagcatcacctggatcgacaagacccaacccatgcgtcaacccgatccgctggcacccgccgcgcccggcgccaaccccacgacacccgtgccgccgccagcgcaacagccctaagcgcccttcaggaaccgaattgccggctccgcgtttcttcctcgttcaaaaggagaaatcgcgtgcgaataatgatggctgtcatcgctctcatggttgtttcggttctcagcatcgttgccctgccctcgtccggcggcgggatgggcgagaatggcgacagcctgcaatcgagcgttcgccagaccacgccaaactagcgcggcggtcgggcgcggcgatatcgtcgggcctgttgaaatcaacgagcgaaatcaatcggcgaccgattttttctttacagaacactagaatctgctaattggcgggcgttgcccttgtagctcagttggtagagcacctgatttgtaatcagggggtcgcgggttcgaaccctgccgggggcaccacttcctctcaatatatcctaattgcatggtcccaatgtcctaattgcatggtcccagcgaacagctgcggccttagaatgccttgtcgtgccagcccattatcatttagctaggcggactttatcaaagggcattgcatgagcgtatcctttcagaccctcagttttctcgcttcccccgccgccgaggcgcttgcggcgcgcgatgagctgattcgcatttacggggatgtgcccgccagggacgccgatgtgatcgtggcgctgggcggcgacggcttcatgctgcagacgctgcacagcacgatgaactccggcaggctcgtctacgggatgaaccggggctccgtcggctttctgatgaacgagtaccgcaccgacgcgttgcgggagcggatcaacgccgccgtggagaacacgttccgcccgctcaggatgacgaccacgaatgccgacgggacgagcgacaccgcgctcgccatcaacgaggtctcgctctttcgccaatcctaccaggccgcgaagctcagggtggaggtcgatggcgtcgtgcgccttgaggaactgacctgcgacgggctgatggtggcgacgccggccggttcgacggcttacaatctttcggcgcatgggccgatcctgcccctggatgcgccgctgctcgccatgacgccggtgagcgcattccgcccccgccgctggcgcggcgccctgctgccgaacaaggtggcggtggacattcacatcctcgaatcggagaagcggccagtgaacgccgttgccgacaactccgaggtcaagtcggtgctgcatgtacgcatcgctcagtcggagcatatgacggcacgcattctatccgatcccgaccgctcctggtccgaccgtattctgtccgagcaattcgaggattgaggcgatgacgcgtcttggactgacggcctgcgccctgctgatcgcagcgcttcctgttgtcgcgcgagcagcggatacgatggatgaccccgtgctgcctgccaacatcacattcgccacgagtacgggctactgggccgacgacggcaacgcgccggccgtcacgcgtccgccgatcgcggccacggcgaacgcgccggcagcggcgacagccactcccaccgcgccaagccaaccccgccgcggctactacaagctgtttgcggttcgccaggccgatcgcaccgccaaggtctatctgcagcagatcgcgcaaaccgatgccgggccgcagatcgtctcgacggtcgaagttcaggaactgaacgatctcaacccctatgtgacggacattcgccccgagaattcgagcggacggctgaacgaaccggggatgttcgccatggtctatctgaagacggatcccgatgcagatgtcgaaagctggaccgtcatcatcgacgagttcggcgaaatcggcgtcgaaaagtcgggacactaacccaaaacagaaaaggccccgcgtggggccttttcgatatcatctcgacaaaaacctgtcagtcgacatcgtcgaccatggcatccggcttgccgctgatgcggtgcgccagcgctgcttccatgaactcgtcgagttcgccatccagcacgtcgtcgggcgcggtgctggtgacgccggtgcgcaggtccttgaccatctggtagggctgcaggacgtaggagcggatctggtggccccagccgatatcggacttggaggccgcttcggcgttggccgcgtcttcgcgcttcttcagttccgcttcgtagagacgtgcgcgcagcatgtcccaggccttggcgcggttcttgtgctgcgaacgctcctgctggcactgcaccacgatgcccgagggcatgtgggtgatgcggacggcggagtcggtcgtgttgacgtgctgcccaccggcgcccgaggagcggtaggtgtcgatgcggcagtcgctttcgttgatgtcgatctggatcgagtcgtcgacgacggggtagacccagatggacgagaacgaggtgtggcgacgggcgttgctgtcgtaaggcgagatacggaccagacggtgaacgcccgattcggtcttcagccagccataggcattgtggcccttgaccagcagcgtcgcggacttgatgccggcttcttcgccgtcgtggacttcgaggagttcgaccttgaacttcgagcgttcggcccagcgggtgtacatgcgcagcagcatgttggcccagtcctggctctcggtgccgccggcgccggagtgaacttcgagataggtgtcgttgccgtcggcttcgcccgacaacatcgcctcgacctgctggcgggcggcctcgaccttcagcgccttcagcgcgtcctcggcctccttgacgatggcctcgtcgccctcgtcctcgcccatctcgatgagctcgatattgtctttcatctgctgttcgaagcggcgtacgccgttgatgccgtcatcgagctgctggcgctcgcgcatcagcttctgtgcctcggtggcatcgttccagaggttcgggtcctctgccttgttgttcaaccagtccagtcgtcttaccgcctggtcccagtcaaagatgcctcctcagcagggtgatagcctgcttggtttcatcgactacgttctggatttccgctcgcattttcccgcttctttgcgttgtcttcaaaagtcgtccgtcaaatagttgtggcggccgcggatgtaaagagccgcgaccgccacgctatttttgggtggtgtcagtatagaccacccgtattggattgaatcgcctggttggcctgcggcgaggtcttcaagatctcctccggcgccatggtgttgtccatgccgatgacggagtagctgtcggcagggccggtgccgggcttgaaggcttcgatgatggtgttcggatcgccctgcatcgcggccatcccggtcttgcgatcgatcgggatcaggttcatgcccggcggaatgacgaatttcgataccggcgtgtccttgacggccgcctgcatgaattcgttgaagacaggcgcggagagcgagctgccggtgccgccacggccaagcgaggacggcgaatcgaagccgatgtaaagaccggccacgagatcaggcgtgaagcccacgaaccaggcgtccttttcatcgttggtcgtgccggtcttgccggcgacatcacgttcgccgagctggatcttgccggcggccgtgccgcgctggataacgccctgcatcatcgaggtgatctggtaggaggtcatcgggtcgagaacggtttcgcggttgtccaccacgttcggctcttcctggttctgccagtcgccggcgttgcaggcttcgcagacacgttcctcatgcttgaagatcgtcttgccataacggtcctggatgcggtcgaccagggtcggcttgatctgcttgccgccgttggcgatgaccgaataggccgacaccatgcgcatgaccgtcgtctcgccggagccgagcgacatcgacaggaccggcatcatcttgtcgtagatgccgaaacggttggcatattcggcgacgacgttcatgccaagatcgttggccagacgcaccgtcatgcggttgcgcgacttctcgatggcaaagcgcagcgtgttggcaccgccgccctcgccttcgtagttgtcgggcgcccagacctggccgttgccgatctgaatttccagcggatcgtcgctgacgaccgaggccggggtatagccgttgtccagggcggctgcgtagacaaagggcttgaaggacgagcccggctgacgcatcgcctgtgtcgcgcggttgaattccgactgcgcataggagaagccgccgaccatggccaggacacgaccggtcttcgggtccatggcgacaagaccgccggcgaccttcggcggctggcgcagacgataggatgtcgaattgtcggcgccaaggcgctcgacatagaccacgtcacccgccgacagcacgccctgcggcgacttcgaggtcttgccaccggttgccgagcggtatgcccactgcatgttcttggcttcgatgacggcgcgctcacgattgggcaggaccttgcccgtaccgtccttcagcggctgcagtccgatgtccacgctgtcgttggcgaccgccagcactacggccagctgccattcgggaacgtcggaaagagtcggaacatcggcaagcgccttgccccagtccgacgtcgtgtcgatctgcgtgatcgggccactgaagccgcggcgctcgtcgtaattgatcaggccatcctgcagcgccttgcgggcgaagagctgcaactgcgggtcgaacgaggtacggaccgagaggccgccctcatagagcatcttctcgccgtactggtcgatcagctggcggcggacagcttcggcaaagtagccggatgcgaaaagcgacggaccgctgctccggccggtgacgccgagcggctgcttcttggcttcatcgccatccgactggctgacgtagccattctcgaccatgcggtcgatgacccagttgcggcgcgtcaccgcggcgtccggatgacggaagggatgatagttcgccgggcccttcggcagcgaggccaggtaggccgcgtcggcgacggtcagttcgttgaccgacttgttgaaataggtgagcgcggcgctggcgataccgtacgaattcaagccgaagaagatttcgttcagatagagttcgaggatcttgtccttgctgtaggcctgctcgatacggaaggagagaatggcctccttcgccttgcgctccatggtctgttcgctcgacagcaggaagttcttggcgacctgctgcgtgatggtcgagccgccctgcgtcggaccgccggtcaggtaggcgaccacggcgcggccgaagccggtgacgtcgatacccggatgctggtagaaattcttgtcttccgccgacaggaacgcggccttgacgcgatcgggaacggcctggatcggaatgaacaggcggcgctccttggcatactcggccatcagcgcgccgttgccggcatgcacgcgcgtcgtcaccggcggctcgtagctgctcagcaccgcgtagtcaggaagatccttcgtcaccgtcgccaggtaaacggcaacggccgccgctccgcccaggaacaggacgcaagccgctccgaagaaatatccaagaagtctgatcatatctaagctaccggtatctcaattatcgatcggcgcgcgcataacaatcgcatgaaccgcggcactttgcacgctgcgcgaattactccatgccgaatgcggccacaagccaattccgtttcgcacacggaaacatagccgtgagtaatggcctgaatgtgaggaaagtagggcttttgcctgcaattccacacggatacatgtttacctgggcaagtgtcacatctcggcaacgactctatgtcagccgcccttggccaccatggaggcgcggtatctcttcaccgcctccgtcaacagattgccgatcttgtcgcgccaggcctggtcgagaagcagtttctcgtcctccgtgttggagagaaagccgagttccagcaggacggagggaacatcgggcgcctgcagcacacggaagccggcatgccggtgcggattgttgatcgtcgtaacctgatccttgaaggatgtcagaacgctttcggccatcgagatcgaaaacgcctgcgtttctcggcgcgtcaggtcgagcaggatatcggccacttcgggcggctcggccgtggccgcgttgccggcgatctgatccgaaaggttttcgcgttcggcgaggtcggcggcgagtttgtcggacgccttgtcggagatggtgtaaacggttgcgccgcgaatatccttctgccgcaacgtatcggcatgcatggagacgaaaagtgcggcgcggttctgccgcgcgatctgcacgcgctcggacagcgacaggaacgaatcatccttgcgcgtcaggaaagccttgataccgggtacgccgttcagccggtcggcgaacgccttggcgaactccagcgtgacatccttttcctgcgtctttgtatcgacgccgatcgcgccggtatcgatgccgccatggccggcatcgacggcgacgatgaagtccccgggtccggcgttttcgggcgccggcatggcactggccgtttgcgcggcctcgggctcgccccaggattgggctttcaccaattcgttgaacgtcgccttgtcagtcgcctcggcttccaggacgagacgctgtcccttgccgccttcatccgcctggaccttcgccgtgccgatacgcaccggcttcgtcgccgtcagaacgatgcgggcgctgtcgccatccatcgtgccgtagcggatatccttgaacagccccctcgcctcgagatccttggcggggaaaccgaaggccgttgccggaagatcgaccacgacccgttccggattggcgatgtagtgaatggagaagctggggggacggtcgaaatccatgacgacgcgcgttctcgcatcgtcgccgacaatgcgcgcgccataagcgagcaggcgttcctgacttgccgcgaccgccaccgaatgaccgagcggcagtgcggcaaccgccatcaccgtcgcaatcaaccaagccctgaagtttttcgtccgcaagccggatttcaccgttgcgcgccgcgtctcgctatacaaccgactgtcatgccccaattgtcatcaatgtcggatcccgcgctacataagattgcggcctggaacaattgccgcagtcgccgcgccggaatcacctcgtccaccgctattttctatgatgctgcaaatccatcaatattatggcacatttggcttttcccttgctattgtgacggagaaaacatacaagcatttttagggtagaagcactgacgggatagagtcgccgacaaggcagccaaccgcaaaggacctggcgccacaaccggcaatcgtccgccgtcttacatgcttacatccgacaatggatcctgaattttccggagtatgcggaaacttcatcggtggattgccaccaaccgctctttaaagagagagcaaactcatcgggcctgaataaggtctttgttttgtcgatctcgcttggtcttttatggtgtcgcagcaggttttatctaaagtctacagaccccgggagaagagtttccccgctgctgtctggctgctgccttccacaccgcaccaatcgcgactttcactatccggcgctgctatgacggaccgcactccccttgtcttatcgactgtggagcctgccgacgttcgactgcgccgaggagctcagcttacatggcagacaaaatgcttatcgacgcgtctcacgaggaagagacgcgcgtcgttgtcgttcgcggaaaccgcatagaagaatttgacttcgagtctcagcataagaagcaaattcgcggcaacatctacctcgcaaaggtaacgagggtcgagccctcgctgcaggccgctttcgttgactacggcggcaaccggcatggcttcctggccttcgccgaaatccatcccgactactaccagatcccgctggccgaccgccaggcgctgctgcgcgcggaggccgaagagcatcgccatgacgacgacgtcgagcatgtcgagaccgcgcgaatcgatcccgccaaccaggagcagcccgacgtcggcatcgtcgccaagcacgagcccgaggcggtagccgaggaagcagcgaccgaagtggtcgtcgaggcaccggcagcagccgaagcaaccgaggttgtcgaagccgctgaagaggctcccgccaagaaggccaagccgcgccgcagccgcaagaaggccgtacccgccgccgaggccgaggaaacggcatccgccgaggctgctgtcgccgacaatgacgacgaaggctccaccggtggcgaaatggcagccatggtcgagaccgacacgatttccgaagacgtcggcgctcgccgccgcggtgacgatgaagacgacgacgatcatgatcacgaagaagaagtgatcgagaatgtcggcgccgaagacgcgatggaagaagttccggatcgcgtgcagcgcaagccgcgcaagcagtaccgcatccaggaagtcatcaagcgccggcagatccttttggtgcaggtcgccaaggaagagcgcggcaacaagggcgctgctctcaccacctatctgtcgctcgcgggccgctactcggttctgatgccgaacacggcgcgcggcggtggcatttctcgcaagatcaccaatccacaggaccgcaagcgcctgaaggaaatcgcacggatgctcgaagtgccgcagggcatgggcgtcatcctgcgcacggccggcgccaaccgcaccaaggtcgaggtcaagcgcgacttcgaatacctgatgcgcctgtgggaaaacgtccgcacactgacgctcgcttcgaccgcaccttgcctcgtctacgaggaaggttcgctgatcaagcgttcgatccgcgacctctacaacaaggatatcggcgagatcatcgtgtccggcgaggaaggctatcgtgaagcgaaagacttcatgaagatgctgatgccgagccacgccaaggtggtccagccttaccgcgacattcacccgatctactcgcgctccggcatcgaagcccagctcgaccgcatgctgcagccgcaggtgacgctgaagtcgggtggctacctgatcatcaaccagaccgaagcgctggtttcgatcgacgtcaactccggccgttcgacccgcgagcattcgatcgaagacaccgcgttgcagaccaacctggaggccgccgacgaagtcgctcgtcagctgcgcctgcgcgacctggccggccttgtcgtcatcgacttcatcgacatggaagaaaagcgcaacaaccgcgctgtcgagaagaagctgaaggattgcctgaagaacgatcgtgcccgcatccaggtcggtcgcatctcgcatttcggcctgctcgaaatgtcgcgccagcgcattcgtgcatctgttctcgaatcgacgacccaggtctgctcgcattgcggcggcaccggtcacgttcgctcgcagtcttccgttgcgctccacgtgctgcgtggcgtcgaggaatacctgctcaagaacaccacgcacgacatcaccgtgcgcaccacacctgacatcgcgctctacctcttgaaccacaagcgccagacgatcgtcgactacgaagcccgtttcggcgtcgccatcatcatcggtgccgatggcgctgtcggtgcacagcatttcgcgatcgatcgcggcgaagccgtcgaaaatccggtcaagatcgaaacgctcttcaacttcgccgccatccccgaagacgacgacgatgacgtcgtcatcgagatcgacgaggaagaagacgaagaactggaagaaaagcaggcgtcggaacgccccgctgccgctgcccgttcagagggcgaaggtgacggacgcaagcgcaagcgtcgccgtcgtcgtcgcggccgcaacggcaatggcgagcagcaggcatccgacgagaacggcgccgaacaggctggcgacgaagacggtggtgacgaggacggcgacgacgccgaaaccacgtccgctgccggctccgaagagcgcgccgaaggcgatgacgcacagcgccgcaagcgccgccgtcgcggcaagcgcggcggtcgccgcaaccgcgaggaaggtgccgaaggtgctgagggcgacgatgtcgccgaagacggtgacgttgccgcaagcgcggaagcagttgagatcacggacgaagccgcggtagcaacagcagacagcacgccggtagacgttgtcgtcgaagctgccgcagcggaagctgtcgaagcctcatcggccatggctgccgtcgaagccggcgccacggtgaccgaggatgtaaagccgaagcgcgctcgccgcagccgcaaggcgtctccggtcgaagagcccgtcgtggaagcagacgtggcggttgccgctgaaaccgcaccggttgctgaagctgccgctgccgccgagccggaagtcgccgaagcgtccgccgatctggcagcgcccgcagaggaagacgccaagcccgctcgcgccaatcgcggcgcgaacgtcgcctcctccgaaccgaccgtcaagtcgtccagcgcggaagcgactgatggcgacggcaagccaaagaaggccggctggtggcagcgccgcggttttttctgagactgattttcggacgtgactgatcgaaatccggctgcggcgacgcagccggattttttcgttcaggagttatgtgtggctggagcccggatgcatcgggtgcacccgatagcgaggcagggatatcttatggtctgtgcaagcgggcacgtcacaccgtcttcggatgcttgcaggctctgacacgcggaccgcgatcgcctataccggcaacgcccactgcttgccaagcagacagcgggacgcggttgctgcccgatctggccgaggcaaacttgtgatctgtcgaagccgcgtcagacgcgcaaggctagccactatccgtgcatattcccgccatgggccatggccgcgaatcaatcgcgttcggagataaccgtcgcgtgagggtactcaccatagaagccgcgccagttagcgatcgcgaagccgaagacgacaagcgcgccgccctgatgcatcagaccccactggagcgggacttcgaacagcagtgtggcgacgccgatcgcgccctggatagtcacgagagcgaacatcacgacggcgcggcgcgcatgcgtcgtggcgggtgcggcgcgcagcatgacgatcatgttgagcagtgtcacggcaaacagcgtgtaggcgccgatgcgatggatgaactgcaccgtcttcggattttcgaagaagttgatccatgccggctgctggatcagcagatcggacggcacgagggcgccgtccatcagcggccatgtattgtatgtgaagcccgcgtcgagaccggcgaccagcgcgcctagatagatttggaacaaggtgagcgcgacgatcgcaccggcccagacatgcgcattcttgctcggcgcgctgtcctttgaatgcggtgacagggcgcgcatgatccacatgcaggagccgaagatcagacaggccgtgatcagatgcgtcgccagacggtactggctgacatcggtgcgcgcggtcaggcccgacgagaccatccaccagccgatggcgccctggaagccgccaagcgccagaatgccgacgagaggccagcgcagacgccgctcgatccggccggttgcccagaaatagatcagcggcagcgcgaagatcacgccaatgccgcgagcgatcaggcggtgggcccattcccaccagaagatgcccttgaactcatcgaccgtcatgtcgctattgatctgctggaactccggaatacgctggtaaagcttgaattcctcctcccactgggcggcgttcaacggcggaatgacaccgtggatcggcttccattccgtgatcgagaggccggagttcgtcagtcgggtcgctccgccgacgatcaccagacagaacagcgccagaagaacaatgccgagccaaattcgtacggccttgcgattgtcatcctgcttgcgcacctgacgcagaatttcctgttcagtcgtgagatcggcgacggccatggagggactccttcgttccgccagttgatttgccttagccactgatgcaaaacaagtctgaacatttgcggcatgccgtcgcggtggcctgcacatccaatctggaattcaacagatgcccgtccgccttcgcaagttcatcggcaccatcctcatcgtcgttctcgtgctcctctatgcgctggtcgccaataccatcgcggttgctacgctcggcagtgcgccgtggtggggccacctcctctatttctcgctgacgggactgctctgggtgttgccggcaatgctcatcatcaagtggatggccggtcccaagcaacaatagcattaatcgcgaaataaccgtgattgacggaaaagccggcggcctggctcccgtaaaggaaatcgacgcgctggcacgctattttcccgggcagtatcttttcccggagaacgcccgtgcaaacgcagaagcttccattggaatccgcgccgcgtgagatcgccgcagacgccgatgccgaacaggcgaagctcggagagactgatgcacgactgttcttcgatgcgatcgagatcgacgtcgtcgattccatggaagccatcgagcaggagtggcgcgcgctcgagcgcgaccgtctgaactcgctgcatcagggctatgactggtgcgcatcctggatgaaagcttttggcaatccggccgccgtcatccgcggccgatcgggtatgcgaaccgtcttcatccttcccgtcgagatcgtccggtcgcgcggcgtgcgtgtcgccaagttcatcggcgccgaccacagcaatatcaacaccggtctgttcgcagccgatctcgcggatgccttcgagacactcgatgcaagtgaccttgccacgcgcttctccggtgcgctccgagggaaagccgacctcttgctgctgcagaacattccgctcacatggcgcggccgtcgcaatccgttggcactgctgccgatggttcaaaatcagaaccatgcctatcaattgccgctgtccgacacgatggaagcaacgctgaagcagttgaacgccaaaggtcggcggaagaagttccgcgtgcaatcgaagcgcctggaggaacttggcggcttcgactacgtcagcggctcggacgccaggagccagcacatgcttctcgaccagttcttccggctgaaaagcgaacgcttcaaggccatgggattgcccgacgtcttcgacgacgtcgagacgaaggccttcctgcatggtgcgatcgatatccgcgacgccaagaacgaactgttcggcctcgaaatgcatgccatacagctgaaaggcgcgcatgccggtcatctggccgccatcgccggcatatcgcgaaagggcgatcatgtgatctgccagttcagtacgatcgacgaaagcatcggcgccgaggccagcccgggggaatttctgttctggcagatgatacagggcctgcacggaaagggcgtcagtttgttcgatttcggcctcggcgaccagggctacaagcgttcctgggcgccagtcgagaccgaccattacgatgtggtgctgccgctgaccgctcgcggcatcgtcgccggcgcggtgcaccggctcgtgacccgaggcaaggcctacatcaagtcacaacagcggctctatcgcgccgcccagcgcctgcgccggttcgccggcgtctgatcaggccgcctgctgggcgaccgtcgcattgccatccatattgccgccggacatcagcacgacgcgctcgtagcccgcctcttcgaagctggtcatcgcggccacgaactgttcctcgacgatctcgggcatggacaggatgatttcgaccgtcttgctatgcgtgagcctggagacgccggccacatcggcggcgccggattcgaccagcacgagatcataggcggaggttagcgcgtcgagcagcagcgagaggcggtcggcgccgcgcatggcgcgacgcatgtcgctggtgccctgcgggatgaagtgggcgtcggagagatgatcaccatggatggtgtcgccaaaggccgcctcgccgcacaagagatccgtaacgcccggcagcgaacgcccctgcgccatcagttcggtcggatgtccagaaccggtcatgtccaccagcacgacgcgggagccggccgacgccagcgtgcgggccagggcgacggtggcggccgatccattgtcaccggtcggtgagatcgcgattgcgagtggcgcgcggctgccgagcaggtactgggcgacggaagcgattgagaattcgttttcctcttccggttgctcgacgacgggctcttcggctgcctcgtcctcccgttcgtcctgctcgtcttgctgcacggccagcatgctcggtgctgccatgcgcgcgcgcggcgagacggcgacaatttcgaccgtttcctgctcgacgcgctcttcagttccgtagcccgatatcggccgcagcgcacgcccgctgaagagttccgccagcatgatcacgatcgaggtcatgatgaaggtcgcgaacgacacgacggcaacgatcggaacgaccttggggaaatagggatcgaccggttgaaccgcggtggagacgatgcgggcatcggctgggctggaattcttgtcggcgcgcgaggcggcctcgcggaagcgcgccagataggtttcaagcagctgccgctgtgccgcggcctcgcgctgaagcgcgttgaggccgacctcatcctcgccggcctgggcgctgttggccttgaccttgttggactgctgatcgagctcctgttcgcgaagcgtcgctactttcgcttcgttctcgatgcttgccaggatcttctgcgtttcctgacggatctgcgtcctgatgtcggcgagctgggcgcgaaggctcttcagccgcggatggttgttcagcagcgatgtctgaaggtcggatatctgcgactgcaggccagattccgttcccttcagccgctggatcgcctgcgacgacatgatgtcctgcaacgtgtcggacggctcgccggacgacagcgcattgcgcacggattgcgcacgcgcctgggcgttcaccttgtcgccacgcacgcgcgtcagctcggcggaaatgtcgttcaactgctgcgtctggaaattgccgccgccattggtcggcagcaggccgcgcgccgtacgatattcggcgaccttctgctcggcttcgctgaccttggtgcggagcgtctcgatctcaggctccagccagcgcgtggcttccgagttggagtcgagcttggcgccgctctgcttggccaggtaagcggccgccatggcgttcgggatcgccgctgcaagtgccgggtccttcgaggtgaaggtgataccaatgacgcgggagccgggaacctggtagacctgcaggcgctcgacgaaagcattgatgacgcgctcttccggcggattggcgagcgggctcttcttcaggttcagcgcgatcagaatgtcgccgagggcggaactgtctgccgcggcgtcgaattccgggagatcgtagagcttctggctgctgatgacctgcttgatgagatcggccgactgcagaagctgaacctggctggagatattcagttcgtcgaggagctggcttgcgttcgcgtcggcggcctgcgcgttggcgaaggccggcgcgcgcggctcgatcaggatgcgcgtttcgctgcgatacttcggcgagaccatcttggcgccgacaaaggccacccctgccccgagcagcgtgatggccacgaccttgagccgacgggcccaaacgccgcggaccagctgggcaagatcgatatcgacatcctgattacccgttacgccggacatgctcgtactccaagaacaaaggtgcccgcgagggtaaatgactatagtaactcaacggttaatgcttgccggcaggcgtccggagcattcggacagtgaagaaaaagcgaattcgacggcggcctttaccggtcattaaccctaacggatcgataacgtgaggaagaagttcgtttcccgtgagaagctagatgcccgtcgcacagcccaagtttctgatggccttgagccttgccgccatgacagcagtcctggccggctgcaacagctatcagcccgctccgcgcgcattcaatcaggcgaccatacagccctattcgctggatagcggcgacaggcttcgcattacggtattcgaccagccaagcatgaccaatacctacacgatcgaccaggccggctacatcgccttcccgctcatcggccaggtcgcggcgcgtggccgtacgctgcagcagctgtcgggacagatcgcgcagaagctcaagcagggctatcttcgcgaccccgatgtcaccatcgacgtcgatcgctatcgctcgatcttcatcatgggcgaggtcggtcagcccgggcaatacgcctatgtaccgggcatgaccgcgcagaacgcgatcgccgttgccggcggcttcacgccgcgcgccaaccagggcgccgtcgacgtcaccagaaagatcaatgggcaggtcatgaccggtcgcgtcaacatatcgtccgcgatcatcgccggcgatacgctctatgtccgcgaacggctgttctgatcgtagatgagcgaacagcggccccttcgcatcattcactgcttcaggtccccggtcggcggcatcttccgccacgtgcgcgatctggtgatcgagcacagcaaggccggccatgaagtgggcattctttgcgacagctcgaccgggggcgactacgaggacgcgcttttcgacgatatcaggccgtatctggcgctcggcctgacgcgcgtcccgatccggcgctcggtcagcctttccgatatcggcgtactttgggacgcctacaagaagatcaaaagtttgcggccggacgtgctgcacggacacggcgccaaaggcggcgtgctcgcgcgactggccggctcagccctgcgggtgaacaggtattgcgtagcccgcctctataccgcccatggcggaagcctgcattattcccgatcctcgcttctggggcagttcgtgctgcggatggagcggctgcaggaatatttcacggacgccctggtcttcatctgcgagtacgagcgcgaaacctataccaagagagtcggtcggccgcgaacgcagacgcgactgatctacaacggcatcagcgagcgggatttcgagctgatccccacccggtccgatgccgtccacttcatctacgttggcatgttgcgggaccttaagggtcccgacctttttgtggacgccttcgccaagacggaacgcctgatcggccggccgctctcggcgctgatgatcggcgacgggccggatcgggatcgctaccgggagatgatggtcgagcgcggccttgggaagcgcatcggcatgctgcccgccatgcgtgtccagcaggctttcgccatgtcgcagaacctggtcgtcccatcgcgggccgaagccatgccctacatcgttctcgaggggcttggcgccggaaagacaatcatcgcgacccgtgtcggcggcattccggaagcgctcggcaaggatagcggagcactcgtggcgccagacaatgccgacgacctcgcgcgggtgatggcggacgccattcgcattcccgaatggcacgacaagacgatgcccccgatcgaacaggtgcgctcggtgttttccgcgaccgtcatggccaacgaggtgctggagctctatcgcgacctcatccgccgcccggcagcaggagcagcgaaagccgcctcgtaaaacgtttcttaggggctttgtgctattgccgactggtgaaacagcggcggtagcctgatgaacaaggcagagaacaacgatcaatttgatctggaaaccctgcgcaagcaagtttccgacgtcaatcgacgcggcgacggcagcgagacgacgagctcggagccgctcaacgactacgcacgtcagatcgccgaacagttcagcgatggcacacgcacgccatcgatcatgatcggacagttccggctgatcgaattcctgtcgcagttcggaatcggcctgctttcctttctgctatgggtggataccgaggaaaccatcgccatgcgagccgttgcgtccctgtgcgtcgcagcgctcctggtcgtcgcgctacagacagccgattgctacaccattccggcacttcgcgcccgtacgcggccgcttcccaaagtgctcctgacatggaccgtcgtctttgccgccatggtcgcgatcatcgcggtcgtcagcccggtcggcgcggcgcagctgcattcctacgtcggctggtttgctcttggcggcgtcttcctgctcgggtcccgcttcctgctcgcctacggcatccggaactgggcgcgaaacggcatcatggagcgccgcgcggttctcgtcggcggcggccagccggccaaggacttcatccgtctgctcgagcagcagccggacaacgacatccgcatatgcggcatcttcgacgaccgcggcgagaagcgctcgccggcgatggtcgccggctaccccaagctcgggacgatcggcgagctcgtcgaattcgcccgcctgacccggatcgacatgctgatcattgcgctgccgctcagcgccgaggcacgcatcttgcagctcttgaaaaagctctgggtgctgccggtggacatccggctcgcggcccattcgaaccgcctgcgcttccgcccgcgtgcctattcgcatgtcggctccgtgccgatgctcgatatcttcaacaaacccattcgcgactgggattcggtggccaagcgctgcttcgacatcttcttcgccgtgcttgcgcttgtcgttgtctggccgatcatgctggtgacggcgctcgccatcaagacgacgtcgccggggcccgtcttcttcatgcagaagcggcatggcttcaataacgaggtcatcaacgtcttcaagttccgctcgatgtattcgaacatgggcgacccgaccggaaaggcggcagtcaccaagggtgacccccgcgtgacacccgtcggccgtttcatccgcaagacgtcgatcgacgaattgccgcaactgttcaacgtgctcatcggcaacctgtcgctcgtcggcccccgcccgcatgcggtgcttgcacaggcccgcgaccgcgccttcggcgacgtcgttgaagggtatttcgcccgccaccgcgtcaagcccggcgtgaccggctgggcgcagatcaacggctggcgcggcgaggtcgacaatgacgacaagatcaagttccgcacggcctacgatctctactacatcgagaactggtcgctctggttcgacctgaagatcctgttcctcacgccgtttcgcctgttcaacacggaaaacgcctattgagcgcgatcgaaccgacatacgcgcgcgtcgccgatccacaacgggcgacactgcggctgatcggttcggcggccgtgactgtcggcgtgttcctttcgggcttcgttatcagcgagcccgccccctatgaactgtggatggccgggttggtcggactgtggttcatcctcggcctcaggatttctcgctatacctttccgcttctggccctgctgatcaccttcaacgtcggcggcatgctgtcgctgacgcagatgaaggatatcgccgacggtcctatgtatatcgcggtatcgacattccttgctctgaccgccgtcttctacgcggcgatcatcgaggacagtcaccgacggctgcagctcatcttcaatgcctgggcattcgcggccgtgattacctcgacgctcggcattctcgggtattttcaggtttttccgggctccgaggtcttcaccctctacgaccgcgccaagggcgcctttcaagaccccaatgtcttcggcccgttcctcgtacccccttccctctatctcgtgcacggcatcctgacgggaaatctgcgtgccgcgccgctcaaggcggtagcgctgctgatccttgcgctgggtgtgttcctgtcgttctcgcgcgcggcctggggcctgtttctgctgaccatcctgctgctgatcttcgtgatgctgctcaaggagcggaccggcgccttccggctgcgcattctggtcctgtccttggcggctatcctgatgatggtcgcctcgcttgtcatcgcattgcagtttccgaaggtcagcgagctgttctcgatgcgcgcgcagctcgtgcagcaatatgacggcgagtatctcgggcgcttcgcgcgtcaccggatcggcctcacgatgatgatggagcggccgctcggcatcgggccgatggtgttcggcaccatttttcccgaagacgagcataatatctggctgaagtcgctgacgacttatggctggctcggcttcgtcagctatatcgtgatgctttgctggaccctctatctcggtttcaagaacctgctcaaggaccggccctggcagccctatctgatgattggctggatcggcgtgatcggtcacgtggcgatcggcaacgtcatcgacatcgatcactggcgtcacgtctacctgctgttcggcatcgtgtggggctgcgccgcgctcgaggcgaggcaccagcgcgacgcaattcgctcgcgacctccgccgagcccttgcgaaccggcgccggcgcgctagactttccttatgattacagccatgcagatacgcgccgcccgcgccatgacgggtatgacgatagagcaactggcaaccgcatccggcctgcccgtcgcaaccctcgaaactcttgagcgtgacgagacgcaaggcgagccgcaggcgctgctggcggtcaagcaggcgctcgaaaccggcggcgttctcttcatcgccagcggcaatcatgacgagggtggtccgggcgtccgtctgaaggcgcgcaccggcggcgacgagggaattcgtcctgagaacctgaactcggcaaacgacgactgagcgcggaacaaaaatcgaggtttcgcgttattcccgcgcattatcaaaatgttgagggatatttacttgagaaactcgaacagtctttatgttgtcatcggcgcgctgatcgtcgtcgtcgccggacttggcgcctacatctacaatgagaagacgaagccgacgggcgtcgagatgagcattggcgagaacggcgtgtccatcgagcagaagtgacgttcaggcgatgagcgcgacctgcgcgcgctcaattcttgagactatggacgcgctgtaaatacagcgcgtcgtcaatgatgacggccgcagcaaccttcatcagatgggtttccgccaactccatcagcaacagcgccacatcacgttccggccacccggcctgaacagcattgtcgaccaccttcgaaagtgattccgacattccagctcgaagagattcgctgtcattgacatcaatcatgaacaacctcatgcatctcccgtatatccatgccataattggaggaaatattcgagatgacattatgattttcagatgatttattcagagcagcggcctaatccaatttaatactggacattggcgccattcattattgacaagccgagaatcatttctcaccgcgcatggaagcgcgctaggccaaaccttgctcttcgttgagagtttttatgatgatcccggctcctgggggctgccgacgatctgtttaaatggtcggggcgacaggacttgaacctgcgaccccttgacccccagtcaagtgcgctaccgggctgcgctacgccccgacctgcctttacggcctgatcctgttagtcttttgggattctcggcgcaagcgaaaaatcgacatcgcttggaaattcacccgttcttttcgtccgacgcgcccagcgtagccgtccggcgccgcaaagcgcttgccctcgctcgctcatctgactattgggacgtcagattgccaagggagacacagcatggaaatcgagatcccctgcccgaagtgcaggaacaccagaatgaagttcgaacgtccgcagccgctggatagcgacatgctgacatgcttcacctgcggacacgagctcggcacgctcggctccgtcaaggcgaagatgctggccgcatatgagcggatgcagaagcagggcctgccgcgcaagcagtgagtgctggactagcggcgtgcgaaaccgatgcggccgtcgtcgttcaacgcgacgccgcagccgtgataatcggcgatcgacatgtgcggagtttcaaacggcgtggcgtgggtcgtcgtgacgacgaccacatccgcgcccgccgcctcgcccgcgaggataccggcgaccgcgtcctcgaacaccaggcaacgaccgggatcaacacccagacgttcggcgccaaggcgatagccttccgggctcggttttccggatgatacctcttcacccgtcacgatcaccgatggcatgggaatgccggcggcggccatgcggagcctcgcaagctccgccggcgcggaggtgacgatggcccatcgctccggcggcaggctgttgaggaattgcaccgcgcccgggatctcgacgatgccgtcgacatcctccaactcctcttgaagcaagagccgcgcttcgtgctcggcatcgacaccaggcagcgccagaccgcggatcacatcgctggcgcgaatgccatggatcgtcttcaggaacacctcgggctgcaagccgtacctgatcgcccagccggtccatacacgctcgaccacggcaatggagttcagcagggttccgtccatgtcgaacaggaaggcgtcataaaccttttcgggggactttgcggtaaccggcacacgaagctcctgcctgacgatacgggatgatctcgggtcggccgacggcgacctcagcggacctgatcgagaaggcgcttgcattccaggagatcatatagcgcctcctgcaacagcgcccggtcttccttgccgacgctcgatttgccgagggacacctcggccgcgtcgtcgtcgccgccgccgaagttgaagaaacggcgggacgcgggcgccttggcgcggccgaccaactgatcttcctccgacatcccgaccctgggctcgccggcatcgccctcgctctggccggtcagggcctgaacgctcgcgagatcgccatggccgatcgcgatgacgaacttgttgccgttggtcttcagaagcttctgtacacccttgatggtgtagccgtgatcatagagcaggtgcctaatgcccttcaggagatcgacgtcttcaggccggtaatatcgccggccgccgccgcgcttcatcggcttgatctgcgggaagcgggtttcccagaaacgcagcacgtgctgcggaagatccaggtcgtccgctacctcgctgatggtgcgaaaagcatccgggctcttatccaaggttctcactccctacgcgattttcagcacgcgatcttcggcgcgtcgcgcctgccgttcgccggcaagcccaagggctcgcacctgaaatgtccgagccgcgactcatcatatttcaacggtttgcttgcgttaattcaagtcacgtctcgaattcgcacagaaaaccttgcggaaaattcaatggaagcgtcgatcagcctcgtcgggcgacggggccgggaagcgatcaggcagccggattggccggcttggtcttgaccttgcgcagcgtgtgcgccttcaagatccgggtcttcagcacgttcgatgccttgaaggtcatgacgcggcgcggagagatcggcacttcctcgccggtcttcggattacgtccgatgcgctcgttcttgtcgcgcacctgaaaggtcgcgaaggaggaaagcttgaccgtctcaccgcgaacgatggcgttgcagatctcgtcgatcacagtctccacgagctccgccgattccgttcgggacagaccgactttgcgaaaaacggattccgccaagtctgcgcgcgtgactgttttgccggtcatctttttccctgcccatcggttttgttttgtgaggacgagcgaagagtatttgtcttgcgccttacggtcaagcccttgttcgttgtcagttttttcggtttttagaccgttaccagcgcagcagcacggcgccccaggtgaagccgccgcccatcgcttcgagcatgacgagatcgcccttcttgatacgcccgtcgccagctgcaaccgcgagcgcgagcgggatcgatgccgccgacgtgttgccgtgcaggtcaacggtgacgacgaccttgtcgggcgcgatgttgagcttcttggccgagccatcgatgatgcgacgatttgcctgatgcggcaccagccagtcgagatcgtccgacgtggtcccggtgctgtcgaaggctgcctgaatgacgtcggtgatcatgccgacggcgtatttgaagacctcgcggccctccatccgcagcttgccgaccgtgcccgtggtcgatggtccgccatcgacgaagagcttgtccttgtgcgagccgtccgaacgcagatgcgcggtcagcacgccacgatccgccgtcgtcccctcgccttcggccgcctcgagcacgatcgctccggcgccgtcgccgaagagcacgcaggtcgtgcggtcgttccagtcgaggatgcgcgagaaggtctcggcgccgatgacaagcacgcgctttgcaaggccaccacggatataagcgtcggcggtggtgaccgcgtagacgaagccggtgcagaccgcctgtacgtcgaaggcaaagccgtggctcatgccgagacggttctggatgctgacggcggtcgccgggaacgtgttgtccggtgtcgacgtcgcgcagatgatcatgtcgatgtcatcgggcgtcatgccggccttttcgagcgccgccagagccgccgccgcgccgagcgaggacgtcgtctcatcttctccggctagataacgctggcgaatgcccgtgcgctggacaatccattcgtcggaggtgtccacgacatcttccatgtcgcgattggtcataacgcgtttcggaagcgcggatccgaaaccgcgaaccactgaacggatcatattcatcaaatcccgtcgctcatgccgcttccggcccgatcgggggcagccgcttggcatgatacttttgcaaatcgttttctattttctgattgaggccattcttggccatgtcgtagccgacctcgatcgccgacgcgatcccttcggcattggcgccgccgtgactcttgatcaccacgccgttcaggccaagaaacacaccgccattgaccttgctcgggtccatcttctcgcgcagcatgtcgaaagcgctcttggcgaagatgtagccgatcttggcaagcagggtgcgcgacatcgcggccttgagatattcgccgatctggcgagcagtgccttctgcggccttgagcgcaatgttgccggcgaagccttcggtgaccacgacatcgacggttcccttgccgatatcattgccctcgacgaaaccgaaatagtcgagcgagtcgatattggcttcgcgcagcaggcgcccggcctccttgacctcttcctgccccttgatctcctcgacgccgacattcagcaggccgatcgtcgggcggtcgatctcgaacagcgcacgcgccatggccccgcccatcagcgcgaagtccatcagttgctggctatcggccccgatcgtcgcgccgacgtcgagcacgatgctctcgccgcgcatggtcggccagatcgccgcgatcgccgggcgctcgatattggccatcgtgcgcagacagaacttggccatcgccatcagcgcgccggtattgccggcggaaaccgcgacatcggcgtccttggtcttcacggcctcgagcgaacgccacatggaggagacatagcggccgcggcgcaatgcctggctcggcttctcgtccatgcgcaccgcaagttcgcaatcgtggagaacggatttctccttcagcttcggaaactggtcgagaataggctcgcactgttccttcaagccatacatcacgaacgatatgtccggatgccgttccagcgccttggcggcaccggggatgactacctggggaccatagtcgccacccatgaggtcgagagaaattctgatcacgcgtccctgatccttttttttcgtcccaggagggcgaaatttcggccaaaataccggttttcccgtcgctgacaactgaattatgtcaaacagcgagcggctttcagtcctttttccagtctttcagaacagcgaaggcggaaggcttcttatcgttctctccggtgtcttctatgtgaccatcgaaggcaacgccctccttgcgggggtacggatcgatcgccatggcggcgaattcggtggccacttcgccggcgtcgatcgtgtcgcccacgaagctttccggcatgtcgggaccatcggggtccagcatcatttcgccggtgtcgttggccggacggcgcgcaagcttggaattttccgggacgaatatctgctcgaagggttcatcgatcttcgatggcaccggctccagcgtcacaacgcagctctgcacgatgcttgcccgcaccctgcccttcacgcggatgccatccttcttccatcgcgcgatctgcagatcggcgcggaaatcgtcgaccgagatcacgtcccaggtttcggcgagcgcctgcaactcgtccttgtcggcttcgagatgaatgtcgacgggattggccgagacgttgccgaccttcacgagataggaaaaaggcgggttatcggttggattcttcatggggtctcctcacgcaacgcccggcaatgttgccgatccggtcgcgatcgtgtcttcggactgcgccgacaattccgattcggcgacgaacatccagtcagcaaggccgcgcatgtcgacggcgtcagccgcttcgggatgaatgttgcggccaagcgccatggcgagagccggaacatcgttggcgtccatggccttggaataggcttcgagccggccatagaacatgccggcgaatttcttcatgcgcttgggaacgctgttgtcgccgatcccgagctcgcggatcgaatggtcgatgtcctggaagaatgcatcgacgatttcctgggcgatttcctggccactggtcgcggatgcgcgggtgcggcgaaaaaacaggatcatcaccgccgacagcatctcgaagcggcccataacggtatcgggaacattcaggctttcgtagaatgcaggcgtgcgcgccgccgaggtcagcgtcgcgtattgccggtcgacgatcgcctgattgctgtttttcttgccaaagagcccgaatatcattgttttttccggaaaggcctcgttctgggcgccaacctgcgtccggccgtgttgcatgatttcgaaagctggtttaccgaagcatgcgcgaattgcaatggcgaaggtggccagtttcgggacagcgcttcgacgacggccactcggcagatggctaacgtccgaccccggaaaggccacaatggttttgcatcagcgtaacattgcatggccgatggctggtatcgatacgttaagggagtagatgtcgttgaagaaacggtatttcaagtctgacaggaaattcctcagcaatgccgccattgccatcatgatagcctccgccggattgaccggctgccaaaccggtacggttctcaacggcggttatgtcgccgacgagcagtcgctcaacctggttcccgagggatcgagccgcgagcaggtcctgctttcgctgggcacgccttcgacgaccgccaccttcgatggcgaagtcttctattacatctcgcagcgccgcgagcgctcgctggcgttccagaagctcaaggtcgtggaccagagcgtgctcgccatctacttcgacaaggacggcgtcgttacccgccgcgccaactacacgctcaaggacggcaagccgttcgacacgatcacgcgcgtcacgccgacgggcggcaaggatctcaccttcctgcagcagctgctttcgggcggcagcgccgcgaacatggccaagggcctgttcggcgccggctcccagccatcgccgcagaacccggccagcctgcgctaacaggaatatctattcgcccatacaaaacccgccggatcgctccggcgggtttttcgttggttgcaatgcttatccggccggagagactatccggcgaggatagcgagcagcagcagcgccacgatattggtgatcttgatcgccggattgacggcagggccagccgtatccttgtagggatcgccgaccgtatctccggtcaccgatgccttgtgcgcttccgatcccttcatgtggcgcgtgccgtccttgtcgacgaaaccgtcctcgaaggacttcttggcgttgtcccatgcgccgccgcccgaggtcattgagatcgcgacgaacaggccgttgatgatgacgccgaggagcgacgcgccaagggcggcgaaggccgaagccttggagccggaaatggcaagcacgccgaaatagacgacgacgggcgccagaacaggaagaagcgacggaatgatcatttcgcggatggccgccttggtcagcaggtcgacggccttgccgtaatccggcttctctgtcccctgcatgatgccgggcttttcgcgaaactgcttgcgtacctcctcgacgatggaaccggccgcgcgaccgaccgcggtcatggcgatgccaccgaagagataggggatgaggccgccaaagagcagtccggcgacgacataggggttggacagatcaaaggagatcgtgccgatattggcgaagtagggatactggtcgccgcgcgaggcgaaatattgcaggtcgttcgcataggccgcgaagagcacgagagcgccgagaccggccgaaccgatcgcgtagcccttggtaacggccttggtggtgttgcccaccgcatcgagcgcgtccgtcgatttgcgcacttccggcggaagatgggccatttcggcgatgccacctgcattgtcggtgacagggccgaaggcgtcgagcgccacgatcatgccggcaaggccgagcatggcggtgacggcgatgccggtaccgaacagtccgccgagctggaaggtcgccaggatgccgccgacgatgacgatcgccggaagtgccgtcgattcgagtgatacggcaagcccctggatgacattggtgccgtgtcccgtcaccgatgcctgggcgatcgaattgaccgggcgcttgttggtgccggtgtagtattcggtgatgacgacgatcagcgcggtgacgacgaggccgacgataccgcagatgaacaggttcatgccggtgatctcacgaccggccacggtgccgatcgccccccaaccgacggtgagcgacgttgccgcaccgaggcccaggatcgacagcagaccggtgacgatgagccccttgtagagggcgcccatgatcgagccgttgctgccgagcttgacgaagaaggtaccgatgatcgaggtgatgatgcaggcgccgcagatgaccagcggatagatcatcgccgactggagcatcggcgtgccgccgaagaagatcgccgcgagaaccatcgtcgcgacgacggaaacggcataggtttcgaaaaggtcggccgccatgccggcgcaatcgccgacgttgtcgccaacgttgtcggcgatggtggcggggttgcgggggtcgtcttccggaatgccggcctcgaccttgccgacgagatcgccgcccacatcggcgcccttggtgaagatgccgccgccgagacgggcgaagatcgaaatcagcgatgcgccgaagccgagcgagaccagtgaatcgatcacctcacgcgaggcgggatcgtggcctagcacactcgtgaggatcagataatagatggagacgccgagcagcgccaggccggcgaccagcatgccggtgatggcgcccgacttgaaggcgatgccgagaccggcggccaggctatgcgaggcggcctgcgcggtacgcacgttggcgcgaaccgaaacgtgcatgccgatgaaaccggcagcgcccgacaggaccgcacccaccaggaagccgatcgcggccgtggcggagagcagcagccaggcggcgatgaagacaacgacgccaacgatagcgatcgccgtatactggcgcgtcagataggcctgcgcgccttcgcgaatataacccgcaatttcctgcatgcgggcattcccctggtcggctgatagcaccgaccggatcgcccagatggcatagaccaccgaaagcaacccgcacgctattacgaataaaagaatcgtcatttcgctctttcctccaaaagagccggagctcactccctctccggctgcgaacacgccgtcctcatttcctcccacagaaatgctgcaacgccgagtggagattgcggggaggaaaacgggacgtcaagcccgcaagggcggaaaacccttacggagcaatgggaaagaggagataagccaatcggaggaaggggccgattcttgcgcgcgaaacgctactttttctgatcgccgcgaacctgcttggcgatgcggtcgagaaccgcattgacgagcttgggctcgtcatcgctgaagaacgcctgagcgatctcgacatattcggtgacgatgaccgcaaccggcacgtccttgcggtcgagaagctcgaaaacgccggcgcgcagaatggcgcgaacggtgctgtcgaggcgcgacagcgcccaatcgtcctgcaacgccgaggcaaccagcggatcgaggcgcttctgttcgcgcacgacgccggagacgatcgaacggaaccaggaaggatcagccttcagataggtttcgccatccagttcctggccgagacgatgggcttcgtattcggcgacgatttcgagaaccccggcaccgccaacatccatctgatagagcgcctgcacggcggcaaggcgcgcggcgccgcgctggttggctgtcttgaccggacgctccgcgttttcgttgctcatactttatgcacccagctttttcttcagctcgatcatggtgagagctgcgcgagcggcaaagccgcccttgtccttgtccgaacgacgtacgcgcgaccaagcctgctcgtcgttttcgaccgtcaggatgccgttgccgatggcaatggattcgctgacggacagatccatcaaagcgcgcgaggattcgttcgatacgatatcgaagtggtaggtctcgccgcgaatgaccatcccgagcgcaacgtagccgtcatagttcgtgccgtcattatccgctccatcgagagccattgcaatcgcagccggaatttccagcgcgccgggaacggtgacgacgtcataggtcgcgcctgcttcggtcaatgcgaaggtggcgccttccagaagcgcgtcggccatgtcgtcgtagaaacgtgcttcaacgatcaagatatgaggagcggtttctcgcgccatgggtcaccttcatttcctagaggatttgccgttcgacaggcggcggtcaaaacacgcctttgctagaatggcaagcaaattcggctcatggctgcggtgcaaaatcgcgaatcgtcccggcgattggcgaggtgctggcggaccgcctgttcgaaaacgccaagtgccgatcgataacgggttgatttcccgcgcaaactcatagttccctggggcaaagggagacgagaatgaccgatcagcagacacccatcgtcaacatcgatgccctcagcctcgaccgctggaagcagggagcgctttacgaaagcgccgatacctcgttcgcaacgatgctgggcctcaaggggctcggcgtcagctataacgaggtgccggcaggcaaatcgagctgtcccttccacaaccatcatgtcgaggacgagatgttcttcgtgatcgaaggagccggcgaataccgttttggatcggcgcgccatccgatccgcaagggcgacgtgctcggcgcaccggcgggcggggcggagacggcacaccagatcatcaacacgggcgcgaccccgctcatctatctcggcatctcgacgaaggccgcaaccgatatcgtcgaatatcctgattccggcaagtttctcgccaagacgcgccgcgagggatcgctcgaccggtcgtttcgcgagatgggccgcgtcggcggcagtctcgattactgggatggcgagcctggggcgtgacgaggaaagcgatcgcgatgaccgagataccgacgatcgagaccgagcggctgatcctgcgaccgcacacagttgaggatttcgaggcttatcatgcgctctggagcaacgatgcggtcgtgcgcttcatcagcggggtggcgtcgacgcgagagcagagctggggacgcatgctgcgcgtcgccgggatgtggtaccatatcggcttcggtttcctcgccatcgaggaaaaatcaagcggccggttcgtgggcgaagcgggcttcctggacatgaaacgcgacatgcagcccgtcagcaccgaggggacgctggaagcgggctgggcgttgatgccggaggctcagggaaagggttacgcgaccgaggcgctgcgggctctgatcggctgggcggaggcacgctttccgtcacggccgatgagctgcatcatcgatcccgacaatgccgcctcgctgcgccttgccgaaaagctcggctttggcgatgctagagcctttcctgcttagattgaagcattctgccggagcaggttttcgtcagggcaaaggcgattggcgaagggcataccccaggtacggtcgagccgatcgcctttgatcctggcggaaagatgcccggcccttcgggttggctgaaacgggccgcctgatcgtccggccggcttggccgtatgcgtgggctacgacgcgcgccggccgggcgaccatccgactccgtttgagccaacagaatgtttcaatctaagcaggaaaggctctaggcgcacgcactataatggcgaggttattctgctttcgcgaccgggaactcggccagtctagcggcatagcgcgccatggtgtcgacttcgaagttgacgaaatcgccggcctggcgcttgccccaagtcgtgacctcgagcgtgtggcgaatgagaagcacgtcgaagtcggtgccatcgacggcgttgaccgtcagcgatgtgccatcgagcgcgatcgagcccttgggcgcgacgaacttcgccagatgctccggcgcgcggatgcggaaacgggtggcgtcgccctcttcggtgacggagaggatttcggccttgccatcgacatgcccggagacgatgtggccgccgagttcgtcaccgatcttcagcgagcgctcgagattgacggggctgccctctttccaggtgccgatcgtcgtcaggcgcagcgcctcttcccaggcttcgacctcgaaccagcgaccgttgctgcctgtttccggcaggcccgtgacggtcaggcagatgccggaatgcgagatcgaggcgcccatatctatggtcgcgggatcgtagctggtggccacgcgcagcttgatgccttccttcaagggtgagacggattcgatcgtgccgacgtcggtgacaatgcctgtaaacatcaaacttctctttcgtactcgtccaggctgtcgtcgccaatcacgcgcgtgcccatatgcttgaaatcggatgggatatcggtcttgcggaccggcgtttcaataccgccttgcccaatcgtgcccgggccctgatagagcaggatgcggtcgacatagcccgtctcgaggaaaagccgcgccgtcctggcgccgccttcgaccagcagcgaggaaatgccgcgggaggcgagtgccgggagaagctgttccgggtggtaggggtggcagtacacgacttcgacgccggcggtttccaaggcttggcggcgggcgtcgagttgattgttcgaggcgtcggcggttgggatgcccccctctgcccagccaatctcccccacaggtggggagattggctgggcggagccgctcgcttcaacatcgactgtctggctggacggctgccacgcatcgatctccccccttgtgggggagatgtccggcaggacagaggggggtaaatcttgctcccacgcctccgaaacctcttcacgccccaccacaatcacaggaacctgccgcgccgtccgcaccagcttcgacgtcaacggcaactccagcagcggatcgagcacgatccgcaccggcgagcgtccctcaagaccgggaatgcgcacggtgagttccggatcgtcggcaacggctgtgccgataccgacgaggatcgcgtcagtttcggcgcgcaactgctgcacttcggcgcgtgcggccgggccggtgatggcgatctggccctcgcccgtacggccgatcatgccatccttggaaacggcaagtttcagaatcacatagggacggttcttcgtctggcgggtgagataggcggcgagcgagcggcgcccctcctcctccagcagcccggtctcgaccccgatgccggcatcgcggagcatcccgatgcccctgcccgacacacgttcatcgggatcggtgacgctgatgacgacgcggctcacaccggatgcgatcagcgcatcggcgcagggcggcgtctttccgtggtgggagcatggctcgagcgtcacataggcggtcgcgccgcgggccagttcgcccgcttgcgccagcgcctgcggctcggcatgcggacggccgccgactgccgtggtaccacggccgacgatattgccatcgcgcacgacgacgcaaccgacggagggattggtggatgtctggccgagatggaggagacccaggcggatcgcctcccgcatgaattgcgcgtcgtccggcgaggcgctcatcgctcagctgtccagcggatcgcgtgcgatcttggcattgatctccgagatcaccttctcgaaatcctcggcatggctgaaatcccggtagaccgaggcgtagcgcacgaaaccgacgtcatcgaggcttttcagcgcctcgagaacctgcaggccgatctgctcggagctgatctcgacctcaccggagctttccaggcgccggacgatcccggagacggcgcgctcgatgcggtcgcggtcgacggggcgcttgcgcagtgcgatctcgaaggagcgcaccagcttgtcgcgatcgaaaggcaccttgcggccggtcttcttgacgaccatgagctcgcgcagctgcacgcgctcgaaggtcgtgaaacgaccgccgcagtcgggacaaatacgcctgcggcggatggacgtattgtcctccgccgggcgtgaatccttgacctgtgtgtcttccgatccgcagaatgggcagcgcatgcgctatccttagccgatgtaatcgtacattgggaagcggccggtgaggctcatcaccttgtcgcgtacggctgcttcgacgctggcattgccttcgtcggagttggcggccttcaggccgtcgagaacctcgacgatgagattgccgatttccttgaattccgcttccttgaagccgcgcgtcgtgcctgcgggcgcgccgaggcgaacacctgacgtgacgaagggcttttcagggtcgaacggaatgccgttcttgttgcaggtgatgtaggcgcggccgagcgctgcttccgcgcgcttgcccgtggcgttcttcttgcgaaggtcgaccagcatcaggtggttgtcagtgccgccggagacgacgtcgaggccgcccgcgatcagcgtatcggcaagcgccttggcgttcttcacgatctgcgccgcgtaatccttgaactcaggctgcagcgcttcgccgaaggcaacggccttggcggcgatgatgtgcatgagcggaccaccctggagacccgggaagacggccgagttgaacttcttggccagatcttcgtcgttggtcaggatgacaccaccgcgcgggccgcgcagcgacttgtgggtcgtggtggtcgcgacgtggcagtgcgggaacggcgacggatgctggccaccggcgacgagaccggcgatgtgggccatgtcgaccatcaggtaggcgccgacttcatcggcgatctcgcggaagcgcttccagtcccagatacgggagtaagcggtgccgccggcgatgatgagcttcggcttgtgggtgcgcgccttctcggcgacgtcgtccatgtcgagcaggttgtcgccttcacgaacgccataggacacgacgttgaaccacttgccggacatgttgaccggcgaaccgtgtgtcaggtgaccgcccgaattgaggtcgagacccatgaaggtgtcgcccggttgcagcagcgcgaggaagacggcctggttcatctgcgagccggagttcggctgaacgttggcgaagttgacgccgaacagcttcttggcgcgttcgatcgcaagctcttcggcgatgtcgacgaactggcagccaccgtagtagcgcttgcccggatatccctcggcgtacttgttggtcatgatggagccctgggcttccagaaccgcgcgggaaacgatgttttccgaagcgatcagctcgatctcatgacgctggcgaccgagttccttttggatcgaaccgaagatttccggatcggtatcggcaagcgagcgattgaagaaggtctgggtagaagcattggtcatcggcgggctcctcaactggaatgcgctaggctattagcgctacgccctttcaagggcaatacgaagaacgacatttgctaggcaatctacgcgcaacaaaaaaccgcgccctgaaagacgcggttttttatgggtcgaacggagcatgcggctcttactgaaccggctgctccatccctgatgtggtgtcgagcgcgagctcggcattgccgtccatctgatagatgtcgtcgcggaactgcacaacaccgtcgggcatggcccaggcggagatgtagacgaagtagacaggcacttcttccgcaagcttgatcggcgtgctgacgcgggtggtgatcacctgctccatctgctggcgagaccacggaggggtatcacgcagcagccaggtggtcagatcgcggacgttctgaacgcggacgcagccggaagactcgaagcgcatgagcttgttgaacaggccctgctgcggcgtgtcgtgcatgtactcgccgttcttgttgtagaagttgatcttcgtcgaagccatggcgttgatcttgcccggatcctggcggaacgtgaggttcggcgccttttcggcgttccagtcgatcgtctccggcgcgacctcctcacccttgccgtcgatcaggcggatgttgttcttcgtcagataggtcgggtccttgcgcatcagcggcacgatgtctttctcgacgatcgagcgcggcgcggtccagtaaggattgaggatgacctcgtagattttcgagttgacgaggtgggtctggcggctgatgcggccgacgatggcggcatggcgcgtcacgacgctgccatcctcgataccctcgacataggcggccgggatgttgaccatcacatggcgacggccgagctcctcggggaaggtctgcaggcgaacgaggttggtggtgagctgctgcaggcgcacatcggccggaacattcatcgccttcagcgtgaattcaccgataacgccatcggccggcaggccgtgacgggcctgaaagcgcttgaccgcgccgtcgacgtaggaatcgaaggacgaggacatgccggcttcgcgcggcaggtcgccggtgatgaagaggcgctgacgcaacgcctggacggactggtcggtgacgccgatctgcaaacgctgctggccaggattgacctgcggccacccgccggcggatgcgatctgctgatactgcgcgattgcctgctgaacgctgggaacggactgcggtccgagaataggcgtgttcgacacgacggcggtggccgtacgcgaagcggccttcgcgtcgaactgatcgtcccagtcgccgcgctccggtgcgttgatgatcgaatcgatcgccgactgcgcgaatgccggcgccgcgaccgtgcttgcgccgacagccgccgccgaggcgagaaacgcccttctggagagagcttcaattccaattttcttcgacattcgtcccaaccacaataatgccgccgcttgagagaccggtggctttgcccttcgtcaccgcgcataacgcagtcgctgcccatccgttgccacggcgcgcctcgaaatctcgctgccggcgatcacttgatcgcgagcagaaaagcgaggttttaggaacctcggctccaggaaacgccggtttccgtgtatttccgctgccatgctaatatggccaattcgtgtctccgccgcaaagcgcaaccttcgatggcgatcgaggcgaaaaatgaaccaaaccattgcaaggattttcctggctaatagcggctaaaacgcgacttgaatacaggcgtttgtgcctcgaagcatggttgaccggtcatgcgttgcaaagatgccacgtcggccaaaacggcaaagccggacgcgcagggaaacgcatccggctttctttgaccttggaggggtcttgttgcttagagacgatacatgatcgagtcgttccagaagcggtcgagacgggtcagcagcttgttcatctgcgcgaactcgtcggtgccgatgccgccgaccttgtcgatcgatgccgtgtggcgctcatagagcttggcaaccgtctcggcgatttcctggccggtttccgtcaggctgatgcggaccgagcgacggtcgatgcgcgagcgctggtggttgatgaagccgaggtcgacgagcttcttgacgttgtaggaaacgttggagcccaggtagtaaccgcgggagcgaagttcgccggcggtcagttccgagttgccgatgttgaagaggagaagagcctggatggcgttgacgtcgctgcgaccctgacggtcgaactcgtccttgatgacatccagaagacggcggtgaagacgttcaacaagatgaagggattccatgtaaagatcacggatacccaggtcctgctgttcacggaagttcgataccgcctgcggcttgattttcgtattcatgatgactgcctcactgttttgtttggcggtgttggttgtcttcccgccttgagacagaccctatcgaatacagataaaattctacttaaactgcaggcttaacagtgccttaccaaaaggcgctgttgtatcagggtaaatcaacacttacctgctgccggcgccggcgcttctcctgccagagcaggaagcggaaaaccgcgtagatgacggcgaccacggcatggaggaaaatgacgagcttgttggctccgaaaatctccggaagaaacccgtacatgacgatctggccacctgccgcgagcacccagatcaccgggccccaggataccgccagccagagcccaagggctgcgaccgggaagaggacggcaaggctagtgctggccaccttccacggcaggctcagcagatcaaagcggccggcaccgatcagcgagtagccgacgagcatggcccaatactgcaatccaaaccagaagcacgatatcgcgatcaggcgcaggaacaggacgaagagaacgccggtcagcgtgcttttcggtatggtcggagaatcagcgttcatgcgtcagacaataggtgcgtggcgacgtcttcgccagcgcttcgtcaccagccgtttgccggttgcggccattcgcccggtttggatttatctgacgacatgataatgagcgcggcaacaattggaaccgccaagagctggaacgatcatgcaggacaagacacacctcgtcgacgaaatcacgggccaccgccggatgcggcgcaaccgcaaggcggactggacgcgccggatggtgcaggagaaccggctgacggtggacgacctgatctggccggtcttcgtggttccgggctccggcatcgtcgagccgatccccgccatgcctggcgtcaaccgcatgagcgtcgacaagctggcggaagccacgagggaagcggccgatctcggcatccccgccatcgcgaccttcccgaatatcgagatgtcgctgcgcgacgagacaggctccaacagcctggaggcgaacaatctgatcaaccaggcaaccgccgccatcaaaaaggccgtgccgaatatcggcgtcatcaccgacgtggcgctcgatccgttcaccagccacggacatgacggcattctgcgcggcaacgagatcgtcaatgacgagacggtcgatcaggtggcgcgcgccgccgtcatgcaggccgatgccggctccgacatcatctcgccgtccgaaatgatggatggccgcatcggcgccatccgcagggcactcgacgccgccgggcaccagaatgtcgggatcatgagctacgcgacgaaattcgcatccgccttctatggcccctaccgcgaggcgatctccacgggcgggctgctgaagggcgacaagaagagctactatatcgacccggccaacggcaccgaggcgatccgcgacgccgcgctcgacgtcgaggaaggcgccgacatgctgatggtcaagcccggcctgccctatatcgatatctgctggcggatgaaggaagccttcggccttccgaccttcgcctatcaggtgtcgggcgaatactcgcagatcaaggcggcggcgatgaacggctggattgacggcgaaaaggcgatgctcgagacgctgctcgccttcaagcgcgcgggctgcgacggcatcctcacctatttctccatcgaggtcgccaggatcctcgccaagcgctgatcgtttcgcgccaatattgtattcggggagagcgtcaccatatcagcggtagccactctcgaaaggagatcgtaacgatgtcgctcaacccgaacccgctttatgccgcacctgacgactggcgcgcctatagcggcacgctgagccgacgcgtctttgcgttcatcctcgactatgtggtcatccttttgctctgcattccagcggcagtcatcctgttctttctgtcgatcgtcacgctcggtctcggtttcttcctctatccggccctgttcgcgatcgtcgcgggcctctatttcggcttcacggtcggcggcccgagccaggcgtcgctcggcatgcgggcgatgggcatcgcgatcgtgcgcgtcgacgggcgtgaaatggatttcctgactgccatcgtgcatctggcgctgttctggatcctgaactcggttctcacgccgctgattctgctggtcggcctgttcaccgaccgcagccgcctgctgcacgaccttcttatcggaacggcgacgatcagaaccgcgtgaaatccgccaagcctctgaaataatcaaacttccccggctttacaggggacgccggcgggccatatccgaaagtataagcgatcataaagcgcggccgaccgccgcgctgttgacgttttcttttcttaagtcatgctgtcatttcagcatgcaaccgaaggacatctccgcagcagatgaatacgcagaccacgccatctccgcagttttatctgacggccccggctgcctgcccttatcttgcgcatgagatggaacggaaggtttttacgcatctcgtcgggccacgcgccgccgagatgaacgacatcctgacgcagggcggatttcgccgttcccagaacatcgcctaccgtcccgcctgcgaggcctgccgggcctgtgtttcggtgcgcatcctcgccgacgagttcgagccgaccaaatcgatgaagcgggtggtcgcggccaattccgatctgatctccaccgaatttccggcgcagccgtcgagcgagcaatattcgctgtttcgccgctatctcgactatcggcaccagcagggcggaatgtccgacatgacggtgctcgattatgcgatcatggtcgaggacacgcatgtcaacaccaagatcatcgagtatcgccgacgcgtggaaggctcggggctggaaacgcggccgagcggtgaactgatcgcggcggctctgaccgatacgatgagcgacggtctctcgatggtctattcctacttcaaccctgacctcgacaagcggtcgctcggcaccttcatgatccttgaccacatcaggcggacaaaggcgctcggcctgccgcatgtctatctcggatactgggttcaaggctcgcgaaaaatggactacaagacccgttaccagccgcaggagcacctgaccgcccgcggctgggagcgtttcgaccccacatcccttcccgaaggcagccaagcttaaatgcccctccccaccctttccgatcacaggaagggcctgctgctgacggcgatcggcggccttgcgctctccatggacattccgctggttcgcctggcaaatggcgatatgtggtcgatcgtcggcatgcgcagcatcaccactgtcgtcgtgacgcttgtgatcgtttgcctgatccggtggatcaagggaagctggccggcgatggtgccgggtcgggcgggtcttgttgccggtggcctctacggcctgtcgacggtgacgttcctgctcgcggtgttcaatacctcgacggcgaatgtcgtcttcatcgtcgccttcaatccgatgttcggcgcgctgctttcatggctgttcctgaaagagcgtccatccatgtcgacgctggtgaccatgatggtgatgatccttggtgtcggcatgatcgtcggtgacggcctttccggcggcaacggcttcggcgatgcgatggcccttttgacagcgctggtgcttgcgggcgcgattaccgtcgggcgtgcgtcacgccgcgccatggggttcgtgccgctgctcgccgccgtgcttccggcggcccttggtctggcgaacgcccttccggcgggtctggtcatcgacaaccccgcctggatcatcttcaacggcgcggtgctgatgccggtgtcgttctggtgccttgccagcggcccgcgctatctatccgcgcccgaggtcggcatgttctacctgctcgagaccatcctggcgccgatctggatctggctgatcttttcagaaacgccgccggtcatgacactgatcggcggctcgatcctcgtcaccgcgattatggcgcactcgctttggatggttcggagacaacctgcgacggaacaagctccggcagtttgacggcgtgaaccgcatcgagttcgcgctccagtccgttcaggatgtgcgtccagccgcgatgcgtccgttcctcgaaggccgaccattcagcgcacatttcatgcgacagcgtcaggcgcgtgccctcccccagcggctcgatatcgatgcggatgcgatcggcgttgtgatcgtgctcggcgaccgaaaacgagaatgtcatcaggcgcggccggcgcatttcgagaaacacgccataatgaacggcgtcgccggtcggccgtctgtcgatgacgaggaaatggccgccgacgcgcggctcgatatcggcgcggatgacccggccgtcatcggtggcgaagaggaagcgtttggcgatctcgggattgagccaggcgtcgtaaacctcgcagggcgaggcattgtaggtgtgggcgacggtcagcgtaatggtcttgcaggcagtcatcaacattcctccgtgatcggacctccatgatcggacatgccgccttcccacgaaggcgccacatacgatcattccgtccgccttcggaatgatgtttgtccatgttgtgattacagggcaaaactagaggaaatgccccgctcgccaagagcggggcgctgatatatttcagccggcgaacttgccgctgcgggggaagcccttgggaacggtacggccggcggaggcgcggtcggcaagccattcggcgagctcttccttgttcttgctgaacgtacggccggcgctgtcttcccagacgaggccatccgcgatcgcgaagcagcgcacgtccgaaatgccgccatccttgtagcgctgcaggcgaacgcccttgccgcgcgacatttccggtacctgatccagcgggaagaccaggagcttgcggttctcgccgaccacggcgacgtggtcgccggaaacgggcacgaggagtttcgtctcgtcgggcatggaaacattcatgatctgcttgcccttgcgggtattggcgaccatgtccgcctcggcgacgacaaagccgttaccggccgtcgagacgatcatctgcttgcgctgcggatcgtggacgaaggccgtcagcacgtcctgatcgttgtccatgtcgatcatgatgcgcaacggctcgccatggccgcgaccgccaggcagcttgtcgccaccgagcgtgaaggccttgccgccggtggtgacgaccaggatcttgtcggtggtctgcgcggggaacgcgatcctcagcgcatcgccttccttgaaggtgagcgtcgcggtgtcggagatgtggcccttcagcgcgcggatccagcccttctcggagacgacgacggtgatcggctccttctcgatcatcgcctgctggatcgcctgctcgtcggcatcgggcgcttcggcaaactgggtgcgacggcggccgagttcggtcgccttggcgaacttcttcttcacctcgccgatttcccaggcaacggtctgccactgcttgtcctcggaggcgagcagtgcttcgatctcggccttttccttgctcagagcgtcgaactcggtgcggatctcgaattcttccagcttgcgcaaggagcgcaggcgcatgttgaggatggcttcgacctggatctcggtgagcgaccagcgcgcgaccatgacgggcttgggttcatcctcctcgcggatgatgcggatcacctcgtcgatgttgaggtaggcgatcagcaggccgcccaggacttcgaggcgacgctcgatggcggcaaggcggaagcgtgaacgacgctgaagcacgtcgcggcggtggtccagccactccttcagaacctcgttcaaagccatgacgcgcggaatgcggcccatggagagaacgttcatgttcagcgggaaacggctttcgagttccgtcagcttgaacatggattccatgaggatggtcggatcgacggtgcggttcttcggcaccagcacgacgcggacatcctcggccgactcgtcgcggatgtcctcgagcagcggcagcttgcgtgcgatcaagagctcggcgatcttctcgatcaggcgcgacttctgcacctggaacggaatttcggtgacgacgatctgatagccgccgcggccgagatcctcggtctgccatttggcgcgcgtgcgaaagccgccgcggccggtcttgtaggcgtcgatgatcgtctggcggtcgtcgatgatgatgccgccggtcgggaaatccggaccggggatgaactgttccaccagcgtctcgaccgtcgcatccggatgcttgatcagatgcagcgccgcgtcgcacagttcatgcgcgttgtgcgacgggatggaggtcgccatgccgacggcgatgcccgacgagccgttggcgagaaggttcgggaaggcgccggggagaaccgtcggttcctggtcttcctcgttgtaggtcagccggaaatcgacggcgtcctgatcgacaccctcgagcagcagcccggcgacatcggtcatgcgcgcttcggtgtatcgataggcggcggcactgtcgccatcgatgttgccgaagttcccctgcccgtcgacaacgggataacgctgcgagaaatcctgggcgagacggaccagcgcatcgtagaccgactggtcgccgtgcggatggaacttaccgatgacgtcaccgacgatacgggcgcatttcttgaaggccgagttcgggcggatacccatctcgctcatcgcgtggatgatgcggcggtggaccggcttcaggccgtcgcggacgtcgggcagcgcgcgatgcatgatggtcgacaacgcataggcgagataacgctcctcgagcgccgccttcaggtcgatcggaagaatgctgtcatcgtctccgccggagggcggcaaaatctcttgtcccataccttctgactaaacgagatggttgatgtgagcaaggaatccgggcattgcggctgtggatgaagtctccgaacagaaagaaaacaaccgctaaaacctttctgcccgaatttggactttgtttgcttgtcccttcaacagaattttagagaacgcaaaatataaaccggcgcagatccgtagtagattgacggccaaccgcccacctggaccagaggaacattcatgacattttaccggacgacgcggctcatgctttcgggcgtggcattcctttctctcgccggctccgctttcgcgctcgatggccaggatctgctgaagaagatcaatgccgcctacacgatgcagggaggcacgctcgcggccgacggcatcgacgtgaacgacaagaccgtcacgctgaagaatgccagcttcaagccgaacaatggcgatgcgctgccaatcggcgaaatcaagctgagcggcgtcgagcaaaacgacgacggcggctactacatcgaggaagcgaccttccccgacatcaacaccaccaatgacggcgcgacgctgaccgtcagcgagctcgcgctcggcggcgtctcgatcccggccgacgccaagggtgaaggcctctcctcgatgatgctctacgagaccgcgcgcagcggcccgctgaaggtcgtccagaacggcgccgagctgttctcgatcggcggcaccgaaatgaacctgacgctgcgcgaagacgagtccggcttcgatttcgacggcaccttcaagggcctcaaggctgatctcggcaaggcgaccgatccgcagagcaaggaagcgatcgagaagctggcgctgcagcaggtcaacggcgacatcaccatgaagggtggctgggacatggcccccggcacgatcgatgtgtcggagttcgccttcgacttcagcaatgtcggcaagctcaacctcgccttcaagatcaacggctacacacttgccttcatgaagtcgatgcaggaagccgcacaacaggcggaagccaaccagaacaaggaacaggcccagcaggccttcggcctcgccatgcttggccttctgcagcagctttcgttcgagagcgcccagatccgcttcgacgacgcctcgatcaccaagcgcgcgctcgattacgccggcagccagcagggcatgtcgggtcagcagatggcggactcgctgaaggcgatggcgccgatcatgctggcgcagctcaatatccccgagctgcagaacgccgtatcggccgcggtcaacaccttcctcgacgacccgaagagcctgacggtcgacgccgctccggccaagcccgtacccttcccgatgatcatgggtgccgccatgggcgcaccgaacacgctgccgcaggtactcggcgtgaaggtttcggcgaacgattgatcgctgtgacgtgaatgagaaaaagcccggcgcgcattgctcgccgggcttttttgttacctgagaatgatcggagctagaaacgaaaaaagcccgactcgcgccgggcttttctcgttcaagcgttgcccgctcagtccttcttgaccggcggcatgacgcgcagcgacagttccatcagctgcttcggcgttgccggcgacggggcgttcatcagcaggtcctgtgcctgctggttcatcgggaacagcgtgatttcgcgcaggttcttggcgccgagcagaagcatcacgacgcggtcgataccgaaggcgcagccgccatgcggaggcgcgccgtactggaaggcgcggtacatgccgccaaagcgttcctcgacatcggtctggctgagaccgaccagttcgaaggccttgaccatggcttccggcgactggttacggatcgagcccgaggcgatttcgaagccgttgcagacggcgtcgtactggtaggccttgagcgacagcgggtcctgcgtctgcagcgcctcgaggccaccctgcggcatcgagaaggggttgtgggcgaaatcgatcttcttgtcttcctcgctccattcgtagaacgggaagtcgatgatccagcacagttcgaagcgatcacgatcaacgaggttcaggtcttcgcccgccttggtgcgcgcttcgcccgcgaacttgtagaatttggacggctcgccggcgacgaagaaggcggcgtcgcccgcttcaaggccgagctggacgcggagcgcttcggtgcgctcctcgccgatgttcttggcgagcggaccggaaccgccgaccttgccgtcttcttccttccagaagatgtagccgaggcccggctggccgagcgattgcgcccaggcgttcatgcggtcgcagaatgcacggctaccaccggtcttggccgggatggcccagacttcgaccttcgggttcgacgcgatcatgccggcgaagaccttgaagccggagccggcgaaatgctcggtgacggcctgcatctcgatcgggttgcgcaggtcgggcttgtcggagccgtacttgcggatcgcgacgtcgtaagggatgcgcggccattccttggtgaccggcttgccttcagcgaactgctcgaagacggaggtcatgatcggggccatcgtgtcccagacgtcttcctgggtgacgaagctcatttccaggtcgagctggtagaattcgccaggcaggcggtcggcgcgcgggtcttcatcgcggaagcacggcgcgatctggaagtagcggtcgaaaccggcaaccatcaggagctgcttgtactgctgcggcgcctgcggcaaggcgaagaactggccggggtggatacgcgacggcacgaggaagtcgcgcgcgccttccggcgaggaggccgtcaggatcggggtcgtgtattcgccgaagccggccgacgtcatgcggttgcggatatcggagataatctggctgcgcttgacgatgttcttgtgcagcgtctcgcggcgcaggtcgaggaagcgatacttgaggcggatgtcctcgggatagtcaggctcgccgaagaccggcagcggcagttccttggcttcggagaggacttcgatctcctgggcgtagagttcgacctcgccggtcgccatgttcttgttgacggtatcttccgaacgcgccttgacgacgccgtcgatgcggatgacccattcgccgcgcacggtctcggcgatcttgaaggccgggctgtccgggtcggcgacgacctgggtcatgccatagtggtcgcgaaggtcgatgaagagaacgccgccatggtcacgaacgcggtggacccagccggagatccggacattggcgccgacatccgacttgcggagggctgcgcatgtgtggctgcggtaacgatgcatcatctcaattcccagtatttggcttgaagacggcggcgggggctcgattggctctcccgttccgacaagaaaatcgggcggaaaagcgcatggacggcctgatttgtcaagacttggcgccgtaagcccgcggttttcgccgtggctgcaggcttatcatatgacaggctccgcggcagtttggccgcaggagggatattgctgaaagtcccggtcaactttaaagaggacacatcaccatttcagggagtcccgccatgcccctcctcacccgtcgcaatcttctcaaggcttcagccgtcgccggcgcatatggggtgggcatcggcgtcgcgggcaagttcggtctggcgcaggcagcacccgagccgcaggtgctcaaggcgctgaagtcggaggcaacgctgaccgaggccggggtgacaaagaacatcatgacatggggtgatgtggcgggtgaagcgggaatgccgccggtgctgcggatgaccaagggcaaaccgtatgcggcgcgactggccaacgcgctggacgagccaaccacaattcactggcatggcatacgcgttcccaacaacatggacggcgtgccgttcctgacgcagccttacgtctataccggcgacaacttcgactatgccttcacgccgcccgacgccggaacgttctggtaccatccgcactgcaacacgctggcacagatgggccagggcatgaccggcgtgatcgtggtcgaggatccggccgatccgacgttcgattccgaggtcattctcaacctgcgtgactggcgcctgggaggcaacggccagttcatcgccgccttccgcccgcgcgacgccgccaagtcgggcactttcgggacgctgagaacggcgaactggaaccgggagccgcaatacgacgccccggccggaggcttgatccgcctgcgcatcgccatcaccgatgtcacgcgcatctattctctgaaggtcgcgggcgcggaggcgaccgtgatcgcgatcgacggcaatccggtgccgaagcgctttccgctcgatctgctgctgctcggacccgggcagcgcatcgatctggccgtgcgcatgccagacagcgagggcgcgacggcgacgctcgaagacattcgcggcaccgcaccgaagaccctcgccaagctgcgcgcggttggcgcgtcgctgaagcgcgatgtcggcgatcttgccgcattgggcgacaacccggttgccagcgccgacctttccaccgccgagaagatatcggtcgtgctcagctccaccgccgagagcgcgcccgccgacggcatctgcggcacgattggctacagtttctgggcgatcaaccgtgttccctggcccggcgatacgaaagacccgacggcgccgctcgccgagttgaagctcggcaagagctatattctgcaggtcgagaacgtgacgcagcatctgcacccgattcacctgcatggcatgagcttcaccgtgctctcctcctcgacgcgggaagcggttccattcgtctcggatacctatctaatccagccgggcgagaaggcgcagctctcctttgtcgccgacaatctcggagactggctgttgcattgccacatcatcgagcatcagaagtcgggtatgacgagttatgtaaaggttgtttgacccctcacggccggtagcggttgacatattgggccgaaaggagaaggaaggttcaaccatgtctatcctgcgaatgaattgagatgattgaaacaaccgccgatttggaggcggcctgcatcgagctggccaagtcagaattcattactatcgacaccgagtttctgcgcgagacgacgttctggccggaactttgcttgatccagatggcaagcccgacgatggaagtgcttgtcgaccccctggcgaaggggctcgacctgaagcccttcttcgagctgatgggcgatgccagcgtgctgaaggtgttccacgccgcgcggcaggatatcgaaatcatctacaacaggggcggcctcattccgcatccgatcttcgacacgcaggtcgcggcgatggtctgcggattcggcgattccgtttcctacgaccagctggtgagccggaccaagggcgtgcagatcgacaagtcctcgcggttcaccgactggagccggcgcccgctctccgaaaagcagctcgactatgcgctggccgacgtgacgcatctgcgtgacgtctacctctatctcaaggccgaactggaacgcgaaggccgttcctcgtggctgtccgaggagatggacgtgctcgaggcgaaagagacctacgacattcatcccgacgatgcctggcagcgcctgaagatgcgcctgcgcaagccgcaggaattggcggtgctgaaatacgtggccgcatggcgcgagcgcgaggcgcgtaaccgcaacgtgccgcgttcgcgcgtcatcaaggacgacgcgatctacgagatcgcacagcagcagccgaaggatgccgaggcgctcggtcgcctgcgcacgatcccgaagggctgggaacgttcgtcggcgggcgccgtcgtggtcgaggcggtgaatacggcgctggcgctacccaaggccgagatgccgcatgcgccgaggcagaatcagccgccggagggggccgccgccgccgccgagctgttgaaggtcctgttgaagctgatctcggaaaagcacggcgtcgcgcccaaggtgatcgccaacagcgaggatctcgacaagatcgccgccgagggcgagaacgccgacgtcggcgcgttgcgcggatggcgccgcgagctgttcggcgatccggccctgcaattgatcaagggcgacgtcgcgctgcgcttcgttggcaagaaggtcgagacggtcgctctctaggtcgtgacgcaattttaccggcgcaccgatttaggtcacaactgcgcccaatcgttcagctaaatctttttcgaagggatatcccatacccttccgaaagggctttcggacgcctacattgcttcaggtgcacgctggccaaggctgaacgaaaaggcccttatgagagaagtatccccggtccagaactggcttctgatcatgctcgtcatggcggcaagcggtgttctctacagcgtcatgttcttccaggacagccgccccttcatcggcgcgatcttcgcgctgtgcatggggatgccgatcatcgcgttcgagcggaaagtcttcctgcgcgggcttcaacggcgcatcgaacagttgccgaccttcacgttcttccttgccgaactcttcatctacgagatcctgatgagcgtgggcttcgcggcggcgggtctatcgctctgggggctcggcctgataacccccagttcgtgggtcgatgcggtcgtgctgccgttcaatgcgtttctctacgcgctggcggtctgctcgctgatgatcttcgtgcttcgcgttcgcgagcttctgggccgcgacgtgttcgcgagcatgcttgtaagccggtaccgaaagccggtgagcgaagagcgcgttttcctgttcatcgaccttgtggattccacgaccttcgcggagaagcacggcgacctgcgcgcgcagcagatgctgagctcgctgttcgcggccttcgccgagcccgtgcgcaagcacaagggaacgatcgacgactatgtcggcgacgccgcgatcatcagctggccgctggagcgcggggtaaaattcgcccgctgcgtgaactgcatcttcgacatcatcggcgccatcgaggcggatgcggagaattggctgaagacctacggtcaggtgccgcgcctgcgtgctgctttgcacggcggcaacatcatcaccgcggaaatcggcgtcgaccaccacaagatcacctatttcggcgatacgatcaacacgacgtcgcggcttgaatccctgtgcaagacgctgaaccgcgctgtgctgatatcggccgacctcgcccagcgcatccagctaccttcgaaagtcgtcgctgaggatctcggccagcacgcggtcaagggccgcggacagagcctcggtgtgatctcgctcgtcaaggccgataaccgtatcgcggcaccgaagcttcaggccggcgtcaaagcgccgacataagaggccgagggcgcgctactcgaagcggaaagcgagccgcttgttggtaagcttggcgagctgctgcaggcggccatcgaggcgttcgccggcgaaatcgcggtattccgaaggcaccacgaattcgaggtcgagatcggggtcgctcgatttgcggaacgtcaggttgcgaacgatgccgggcatcgaggccgagaacagatagacgacgcgcagcatgccgccaagcagcttggcgcgctcgacatattgcggcgtggcaatcgtcgccagcgggctggtcgcgccgtcgtcgtgcaggccttcgaagcggtagtaattggcgagcgcgatgaaggcgcggccgggatggctgatgccgacgaaggacgtgtgggcgatgatgttcagcgcctgaaggccacgataatcgggatgggcgcgccagctgatgtcggcgagcaggcaggcggcctggcgatagcgggcctcctccggcgtctccgagatatcgaagaacggcatcatccggccggtccactccgagagctcgcgggcgtgttcgggcgagcgcgcacgcaggatcgcgagttcacgcgcggcctcgatcaacgggtcggcgcggcgttcgctttcggagagaagcgagtagagatagccctcgcgcacgccctggccggagaaggagatcaccgagggcttcatgacgctcagcacttccttcatggcaaccgcgccatatggaaggagcgcacggcggtatttcgataccgccgcccaggcggggtccttggaatccttggcagcgtcgacctgatcgaggaacagcatcatctgctcgaaagagatctcgtagccctgcatcatgtgcagcgggtaattgatcatctccatatgcagcttggcgatatttcgccaggtgccaccgacggcgtagaaggtgcgcccctcgcccttggccagaagcctggagatggtctttacatgcttgcgggcgaaggtacgggccttgtccatcgagccgccggcatattccgacaggcgcagcccaccgagcggcagcgtcacgccctggccgagctccttgcccttgatatcgatcagttccaacgagccgccgcccagatcgccggcgatgccatctggcgtatagaagccgctgacgatgccgagcgcggagaacctggcttcttcctcgccggacagaacgcgcaccttgcgctgcaggatggtttcggcgcgatgaatgaaatcggggccattcgaggcctcgcgggccgcggctgtcgccagcacgtacatggtcgcagcacgcgcctggtcggacagcgccttgaagcgatgcagggcggaaagcgcgcgttcgacgctggcctcgtccatcttgcctgtcagcgctatgcccttgccgagaccacagagaaccttttcgttgaaaaggatcgtgggcgatctcgacaagccttcatagatgaccacacggatcgagttcgacccgatatcgacaacggagaccggagcaatccctggaaggcgcccctgggcttctgattcaaccatgcaggtccagttttatctttttgtccggccggaaagaaggccggcaatcagctttggcgcactggatttcaacgcttcaccgcggcccgaaaggctcggattggtcatgaaatactgttgcgcattgaacggctcctcgcccttgcgcacttccatgcgcctggacgtcccgtcggccaatatctcgtagctttgctgattgtcaatgaggttgcccagcatgatctgtgacaaaacctgctcgtgcacggtcggattggtaagcggaaccagcgtttcgacacggcgatcgaggtttctcggcatcatgtcggcggagccgatatagaccagcgccttgtccgacgggaggccgtgaccattgccgaagcagaagatgcggctatgctccaggaaacggccgacgatcgacttgacgcggatgttttccgagagaccgggcacctgggggcgcaggcagcatatgccgcggatgacgagatcgatctcgacgccggcgtggctcgccgtatagagcgcgtcgatgatttcgggatcgacgagcgagttcatcttcatccagatggccgccggggcgccgctcctggcgtgcttgatctcttcgtcgatgtggcgaaggatgcgcgatcgcagcgtatagggcgatacggcgagcttcatgctctcttccggctcgccatagccggtgatgaaattgaagatgttggccatgtcgtgcgcaatcacaggattgcaggtgaagaacgacaggtcggtgtagatcttcgcggtgatcgggtgatagttgccggtgccgagatggcagtagctgcgcagcttgccctcttcgcggcgcacgaccagcgacatcttcgagtgggtcttcaattcgatgaagccgaaaacgacctgcacgccggcgcgttcgaggtcgcgcgcccagcggatgttggcctcctcgtcgaaacgcgccttcagttcgaccagcgcggtcaccgacttgccggattcggccgcgtcgatcagcgcgcggacgatcgggctgtcgttggaggtgcggtaaagcgtctgctttatcgccaggacgtcaggatcgcgcgcagcctggagcagaaactggaccaccacgtcgaaggactcgtacgggtgatgaaccaccatgtccttctcgcggatggcggcgaagcaatcgccggcgtgctcgcggacgcgttcgggaaatcgcgcattgtaggagggaaacctcaggtcgtcgcgcggcgccttggtgatctcggacagcgtgttcagcgccagaagacccggcagcacggcgacgcggttgtcgggtacgttggtcgcctggaccacgaactgacgcagcgaggccggcatttcggaatcggtttcgaggcggatcaccgaaccgcgacgacggcgcttcagcgctgtctcgaagaaacggacgagatcttcggcctcttcctcgacttcgatatcgctgtcgcggatgatgcggaacgtaccggaaccctgcacctcgtagcccgggtagagccggtagatgaagatattggcgacatcctcgagcgtgatgtagcggatcgtgttgccgtcatccggcaggcgcacgaaacggtcgagcgccggcggcaggcgcagcagcgccgtcatcggctcgcggccgttcttgctgaccagctgcaggccgatcgagaagccgagattgggaatgaaggggaacggatgggccgggtcgatggagagcggcgtcagtaccgggaagatcgcctgctcgaattcggtggcgagccagttgcgatcggtttcgctgagcgcgcccgggcgaacgatcaggatgtcttccttggcgagatactgctgcagcacggccagcgaggcctgctgctccatctgcagattgtcgatctcctgcaggatggattcgagctgctcggccggcgtcttgccgtcgggcgtgcgcacgacaatgttctgacgcacctgcccttcgagaccggcaacgcgcaccatgaagaattcatcgaggttggcggccgagatcgacaggaagcgaacgcgctcgagcagcggatgctcggtgttcagcgtttcctcgagaacgcggcgattgaactgcagccaggagaattcccggtttatgaagcgctcggggctggagagcagttcttcaagcgtaggaacgttcgccttggtttcaggagccgtctcctggtttcccgcgactgcactgtccatcgttcgattgccccctcatgattgcgccaagccgaatatatcagtttcacgacggaactgtgacagtcaatcagccagatcggaattgcccaattcattcaacacttcagcggcaagcgcgcgcgtgatcttggtgcctcttgaaagcgccagccggtccagccgctcgacgatcgtctgcgcggcattcagcgaccgctccatcctcacgacaatatagagcaccagtttgtcatctatataaagctgacgatcggcgaagagcttgacgatgacctgcgacaggagctcctcgtctggctcgccgatctcgacgaccgtcgccgccttcaggcgggaacgcaggtcggccagctcgaccggccaggacatcggccagagacggctggtcatcaacaggctatggccgttttcgcgcacgctgttgatgacgtggaacagctcggtgtcgtcgaagcccaggcgatcgacgtcctcgaagagaaccgggccgctcgccgcatcgaccgccgcgttgacgccggccttcggatggatgagcctggcgccgctgtgatccttccagatattggcgagatgcgacttgcccgacccgaccgggccggcaaggatgacgaccggcgacggccagttcggccaggcatcgacgatctcgacagccgccgccagccgctcggagatcaggagatcgtcacgaccggtcgcggcgtcatgagaaaaggccaggggtagctgctccacgggcttgcgccttgagtcagcgtttttcacgtcagtcatttcgggccagcttttgtcttccgtaccggggccgccttcgcctcgcccgcatacaggtcgctgtcaaggtagcgcgaaagcgcgaaacggacaagaacgccgacggcggcggcggccggcaccgcgaccagaaggccgacgaagccgaacagcgctccgaaggcgaacagcgcgaacatcagccagactggatgcagaccgacgctatggccgacgagcttcggctgcaggatattgccttccatgaactggccgctgaagaagacgacgagcaccgcgccgacccagaggtaatccggccagaactggacgagcgccacgccgagggcggcaatcaatccgaccgtggagcctacatacgggatgaagctgatcatgccggcgaagaggccgatgagcaggccgaaattcagcccgacgagcgacaggccgaccgcgtaccagataccgaggatgaggcagagcgagccctgcccgcgaatgaagccggcgatcgcctgatcgatctcgcgcatgatctggtggacgtttgccacgtaatcgcggggcacatacttgtcgatgttgtcgaccatgcgatcccagtcgagcagcatgtagaaagcgaccactggtgtcacgatcataagcgatatcacgttgacgacggccaggccggagctccagacctggctgaacagcccggtgagcaggccgaagccctgcgacaggatttccgagaaattgttcttgatggtgccgagctggttcttgatccaatctggcagcatcgagttctgctgcttggcgatgaaggcctgcagctggtcgatatatcccggcagccggccggcgaaatcggcgaactggctggcgaggatcgggatcaggatcatcagcgccagcacgatgaggatgacgaaggcgatcaggatgacaatggtcgccatcaggcggctgaggccgagcttttccagccggtcggcaacggggtcgagaaaataggcgatcgccatgccggccaggaacggcagcaggatggaactgaacaccagcaggaaggcaatgaagaatgcgagcacgatcagccagaagatgacctggcgcttcagactggcgccgctaacctgctgtggcatcatgttctccgctgatcgaacgtcggtatatgccgcatcgcagcgatacggcccgcgagccacataggatgcagccgcgagaatggtcaaccccggcgtccaatttcccgattgccgtggccgaaagagcgggaaattggggcttttgccacgcaatgccttgcataaaggcccctgtcatgcaatggcgacccgcatgtgacgcggggatatttcccgcccgacgacagccatcggagagcagtatgagccagtccggaaaaaacggtctcacctatagcgatgcaggcgtggatatcgacgctggcaaccttctcgtcgaaaagatcaagcccgccgtacgctcgacccaccgccccggcgcggatggcgaaatcggcggtttcggtggcctgttcgacctcaaggccgccggcttcaccgatccggttctggtcgccgccaatgacggcgtcggcaccaagctgaagatcgcgatcgatgccgattatcacgacaccgtcggcatcgacctcgtcgccatgtgcgtcaacgacctcgtggtccagggcgccgagccgctgttcttcctcgactacttcgcgaccggcaagctcgatccggaccagggtgcggcgatcgtcgaaggcattgccgcaggctgccgcgacgcgggctgtgcgctgatcggcggcgaaaccgccgagatgccgggcatgtactcctccggcgattacgatctggccggctttgccgtgggtgcggccgaacgcggcaagctgctgccgtccggagacatcggcgaaggcgacgtcatcctcggcctcgcctcctcgggtgtccactccaacggcttctcgctggtgcgcaagatcgtcggcatttccggcctcgcctgggatgcgccggcccccttcgctgatggcaagacgcttggtgaagcgctgctgaccccgacccgcatctatgtgaagcagctcctgagcgtcatccgcgagaccggggcgatcaaggcgctggcgcacatcaccggcggcggtttccccgagaatattccgcgcgtgctgcccaagcacctggcagccgagatcgatcttgcggccgtcaaggttccggccgtgttctcctggctggcgaagaccggcggcgtcgaggcgaacgagatgctgcgcaccttcaactgcggcatcggcatgatcgccgtcgtttccgccgagaacgccgacacggtcatctcggcgctggaagcgcagggcgaaagcgtcgtgcggctcggccggatgatcgcgcgcgccgagggcgctcacggcacgctctacaagggcacgctcgccatatgacgtctttgcgcaaacgcgtcgtcgtcttcatctcgggcggcggctccaacatgatggcgctggttgccgccgcgaaggcccaggatttcccggccgagatcgtcggcgtgatctccgacaagccggatgcgggcggccttgccaaggcggccgccgagggcatcgcgacctacgccttcgcgcgcaaggactacgccagcaaggaagcgcatgaggaggcgattttcgcggcgctggacgcgctgtcgcctgatattctctgcctggcgggctatatgcgcctgctgagcggcacgttcatccagcgctacgaggggaagatgatcaacatccacccttccctgctgccgctatttcccggcctgcacacgcaccagcgcgccatcgacgccggcatgcggatcgccggctgtacagtacatttcgtcaccgagggcatggatgaaggccctgtcatcggccaggcggccgtgcctgtactctccgacgacaccgccgatacgctggcggcgcgcgtgctgacggtcgagcatcagatctatccgcaagcactgaagctgtttgccgagggcaaggtacggatggaaggtggcaaggctgtcagaacgggcgatgcgtccggcaacgccacaaccggtgctgttatctccgcctgattgaccggcgagatgatgcggatcatcatgtgcgtggcccacggagcaacgccatgactgttaccgtcaacatcgatgaagcaagccttcccgaactccttgccaaggtcgaagccggcgaggaggtcgttatcctgcgcgatggtttgccagtggcaaggttggcccctgtcgtggcggatcacgaaaagcgcaggcaggccatcgaggccgtccgtgccttccggaaaaccatgccaagcactacagcggaagaaattgccgagtggaaggcgacgggccggcgatgacgcggcctacctagcgctggcaattagacagagtctgccgctcgccaccctggacaagcaactgatcaaagcagcggcccaccagggcgttccgctgcttcgctgagttgatcctgatcgttacgccgcgatcgcccgtggctggtgcagcgtgccgtcgctgtagacgaagcggccgccgcggaaggtggcgcggatgcggtggatgtctccggcttccacgaccacgaggtcggcgcgctggcctatggcgatttcgccgcggtcgacgaggccggcggaacgggcggcgctcctggttgccatggcgacggcggtcggcaggttcgtggcctcggcgatcttgaagatgccgggaacgaaggcggccgggtgatagtcggcggcgatgacggagaggacgccggcgcgggcggcatcgagcgcgctcagattgcccgacatggactggccgcgcagcgcattcggtgcgcccatcagcgtccagagcccacggcggcgcgcttcctcggcggccggcagcgtcaccgggaattcgctgatcgtgacacccatgtcgtgcatctcagccaccttctcggcgctgtcatcgtcatgcgaggcgagcgacagcttgtgacgcagcgacaggtcgacgatccggcggagcgtggtctcgatctcggggttgtcgcgcatggcgatacgcttagcgaccatctcggcggccatctcctcggagatggagcggcgctcggccatgctcaggatgtaactctggatattgttgtactggccctgccccggcgtgtgatcggtcagagagaccatgtcgacatggccggcgtccagcagcttctcgagcgcaggcgcggcgccgacattggtgatctcgtagcgcgcgtgaacgcggtgatcgatcagcagattatccttgaagcggctgacaccctcgatgacggcgcaggtggtttccagcgagcggacatggccgtagacgctttcggtggcgaaggagacggcggcataggcggtcgtcacgccatgggcggcgagcttcttgtcgagctcatgaatggagaagccgatcggcatcatggcgttggggcgcggcgcgatctcgcgctcgatcatgtcgccatggagatcgacgaaccccggcatcagcaggcgcccctcgccatcgatggcggcattggcgaccgtctccgggcggatctcggcgatgacaccatcctcgatgcgcaccgagccgttgttcacgacctcatccggcagaacgatcgtgaaattgctgagccacatcggctttctcctcatagcagggaattatgacaagccggagccgatagccccgattcatgacatgcgaatgaacacctcagggcttattcaaggcagccctgttcagcgccgcccattgcagcagaatgatcgtcttgaagtcgatgatctcgccgctggcgatcatctgcaccgcctcgtcgagcggaatttcgacgacctcgatgtcctcgtgctcctcggccaagccgccgccttcggatacgcggtcctccgtgtcgatcgaagccgcgaagaagtgcacgagttcggcgttggcgccgggagaactgtaggccttgaagaggaagcggatgtcgcggacgcgaaagccggtttcctcgatggcttcgcggcggatcgcctcttcgggctcgtcgccgtcgagcagcccggccggcgtctcgagtatccaggccggctcgccatggagatggacgggcagacggaactgacggacgaggacgacggtatcgcgcttggggtcgtgcagcaggatcgtggcggcggccgtgcggtggtagatctcgcggtggatgcggtgcgtctcgccatcggagttggtgtaatcgacctcgtaggtgctgagccgtgtccagccatccgagagtgtcttctcctggatgatctcggccttcgccttttcaaatttcgtcatgccgcatccttgcgaagccaaaccttgttgtcgtggacggcagcgccgccatagggcgcgatggggtcggcgccggtcagaacgttgatgccttcgccgtccacatgcgccttgttcggccacaaaccctcggcgatcagcacgcccggcttgacctcggtcgtcagcctggcgtgcaggcgaacttcgcctctggcattgccgacctggacgagatcgccatgagcgatgtcttgggcttgcgcatcggcagggttgatcatcagttccggccgcccctccttctgccgcgaggtcttggtctcggcgaagctggagttgaggaaattgcgcgcgggcgatgtggcgaggcggaacggatgctcggcatcggctacctcgatgacgtcaacctgatccgggaatgcaggaagttccggatatggcccgagcaggccgacggcttccggcgggcggttcggcgccggctggttgcgccagtcagggcggaagtggaagcggccatcgggatgggcgaagccgttgatgaaatgcgcgtcgtcgaaatccggctggcggtcgaaccatttgtgctcgaggaaatggtcgtagccggggagttcgctcgattggagaacgcggtcgatcatctcgcgcgccgtgaagccgaagcccgggcgatcggcgacgccgaggcgcctggcgagttcctcgatgacgaagagattggtgcgtaccgtctccggcggctcgacgagcttggggccgagcaggatgtggttctgaccaccggcgcggtagatgtcgtcatgctcgacgaacatggtggcggggatgacgatatcggccatctcggcggtatcggtcatgaactgctcgtggacggcgacgaagagatcgtcgcgggcgaagccgcgcttcaccagccgctgctcgggcgcgatgttcacagggttggtgttctggataagcatcgcggtgaccgggccgcgatggcggagcgccacggcatcgcccgtcaacgcgcggccgatctgcgactggtcgatcatgcggatatcggcatccttcatcgacttgccggtcagttccgcgttgttcatgcggaagatgtcgctgttcgaatggaaggcgccgccgccttcatattgccaggagccgagaacggtggcgaccgaggctgccgcgtgcatggcgaccgcgccgttgcgctggcgggtaaagccataaccgaggcggaagaaggtcttcttcgtcgtgccgacgagctttccgaaggcttcgatctcatcgaccgagagcccggtgatggcggcggcccattccggcgtcttcgtcttcaggtgcgcttcgagaccggcgggatcgtcggcgtatttcgccatgtaggcgcggtcggcatagccgtcgcggaaggcgatgtgcatggcggcgcaggcgagtgctgcatcggtgcccggcttgaggatgagcgccaggtcggcctgcttcatcgtcgggctgtcgtaaatatcgatgacgacgatgctcgcgccacgttccttgcgcgccttgatggcatgggtcatgacgttgacctgcgtggcgaccgcgttggtgccccagatgacgacgcaatcggtgcgcgccatttcgcgcggatccggccccctgagcacccctgtcgccatggtgaaaccggtccaggcgggattggtgcagatcgacgagaaaaagccggaatagcgcttggcatggcgcaggcggtcgatgctgtcgcgctgtacccagcccatggtgccggcatagtaatagggccagatcgcctcgctgccatccctggcctcggccttgacgaaggcttcggcgatttcatccagcgcatcgtcccaggaaatccgttgccactctcccgcccccttggcgcccttgcggcgtagcggatgcatcaggcggtcgggatgatagaggcgctcggcatatcgggcgaccttggcgcagatgacgcccgaggtgtagctgtggtcgtttgcccctcgaacgcggccgatcctgccatcatctatgacctccacttccagcgcgcaggtggagggacagtcgtgcggacaggccgtgtggccgatccggacagcagacttcggggatttggcttcgatgggggtcgcaatgttcatggagtttctatattccaaccggaaaccggccaaaagccggaaacgacgtcccccacgcgaattcatgtaggcatcagcgaaaatgaactaccgccacatctaccatgcgggcaactttgccgatgtcctgaaacacgcggttctcgcgcgtctcgtgcgctacatgcagaagaaggatgcgggcttccgtgtgctcgatacgcatgccggcatcgggctttacgatctctcctcggaagaggcgcaaaagacaggcgaatggcgcgacgggatcggcaagatcatggaggccgagctttcgccgcaggtggccgaattgctggagccctatctgagcgcgatccgcgagctcaatccagaaggcggcatgcgctactatcccggctcgccgaagctgtcgcgcatgctcttcaggccgcaggaccggctatcggcgatggagctgcatcccgaggattaccagcgactgcatcgcctgttcgagggcgatcatcatgcccggatcaccgagctcgacggctggctgtcgctcggtgcgcatctgccgccgaaggagaagcgcggcatcgtgcttgtcgatcctcccttcgaggaaggcggcgaatacgagcggctggtcgatggtctggccaaggcctaccgccgctttcccggcggcacctattgtctctggtatccaatcaagaagggcgcgccgatcaaggaattccacgaggcgctgcaggcgctcgatattccgaagacgctctgcgccgagcttaccgtgcgcagcgatcgcgggatggtcaccgggctgaccggctccgggctgatcatcgtcaacccgccttatacgctgaaggacgagctgcaccagctgctgccggcgctgaaggatcatatggcgcaggaccgttatgcctcgcaccgcgccttctggctgcgcggcgagaacaaggccgtgaaagaggattgaccgcgccttttcggcgcgaaatagtccggccacattccaagtacgttgccaggcattttgaaagagaccgacgatgaagatcctttgcgcgcccgcctccccctattccagcaaggttcgcatggccgcgcgctatctcgaactcgatgctaccgagatccgcgtcgacaccaatgccggcccggcgatcctggtcgacaacaatccgctcggcaagatcccgaccgtgctgacggatgacggtgtttcggttttcgacagcgtcgcgatcatgcattatttcggccgactgaaaggcaagcagctctatccgtcgaagaacagcaagcggacagaggccgaggtgctggaagcgctctgcgacggcatctgcgactgcctgctcgccatcgtctacgagcgccgcttccgcgacgaggaaaagatccatcagccctggatcgaccggcagtggaagaaggtcgtgagcggcctcaatcacctgagcgtccatctgccgaagatcggcaagaagctgcatggcggccacttcgcgctggcggcgacgctcggctatctcgacctgcgcttcaagggccagtgggaagccgagcattccgaactgatcggctggatgcggaccttcgagaagaagttcccggcctacttggagctcaagccccagggctgagagagctcggcttcgatcacagaattcgagagtctttcgaatctgttggcgagcctgcctgatgtgacggatgaagaatccgacaacctcagtcagcgaaacgcaacaaaaaagccggagcgatgccccggcttttttcatttacttctgatcggctgatcagaacttcatgccgataccgaccttgacgctgttctcgtcatagccgcgcgaaatgttcgcgccgccgacgttgaagtcgttcttctggtagtcggtgtagcgatattcgatacgcgccgtgatgttgttcgtgaccatggcttcggcaccggcgccgaccgtgtagcccagcgcgctgtcggtatcggaaccggccgcgttgctgaacttgttcttggcggccgcgagaccagccgtaccgtagatcaggaaggggttcaggtcgtaaccgatacggccgcggatcgagccgttgacttcgttcttggcggtaccgccgtcgaccgcgccgtcagcgccggagtagccgatgtcgccttcgacaccgtatacgatctggccctgctgccagttgtaaccgctgtagatctgaccaccgaaggcacgggcgttatagtcgttggcgaacctgcccatgttgtaggtgccggcgccgccgaggtagaagccctgccagttgctggtcggtgcaacatcgttctgagcgaccggagcttccgggatctggtcaatggcatcggccgcgtaggcagcggaaatgccaccaagggcaacggtcgaaaccaacaggctagcaataaacgtacgcatactcatctccttatcgaacccgcgcccttcatcaactgtgttaccgtgaagcattcgcgagcaattacgcatgtccctttcggattgagagggaaattgatgcgcaaatgaggatttggaagagccaaaatgtgatttgattgtggcttaggggtgactgaaattcgatgttgctttatcgcaacaaacacttcattaaccataacgaagcgttaaatcatgaatacttattttatcgaattatattcttaaataatacgcacaatatccaagtttcgcgcacactcaagacgcctatttataagatctgatcggccgcctatataagcaccgcagaggttcgcgggatgaagaggcaggattttgagcgagacaagacttcgaacagcgctggtgacgggttcagccaagagaataggccgggcgatagtcgaagatcttgcagcaaacggcttctccgtggcgatccacgccaacggttccatcgcggaagccgaaaattttgcggcgaaattgcggcaggacggcaaaaacgcgattgcacttcacgccgatttgaaggatgtcgagggcaccaacggactgataaaaaaggcatttgaggcgcttggaccgctcgatttgctcgtcaacaacgcatcggccttccacaatgattcggcgcaccactttgacgccacagcctgggacgaccatttcgcgctccacgtgcgtgcgccctccatattgtccgccgcctttgccgaacagctgccgaagagtgcagcggggctgatcgtcaatatcatcgaccagcgcgtttgggcgctcaatccgggcttctattcctatacactgtcgaaggcggcgctgtggacggcgacgcagacgatggcgcagagcttcgcgcctcgtatccgtgtgaacgcgctcgggccggggccgacggttcgaagtgcccgacagagcgaagaggacttccagcagcaggtcgacggccttatcatgaaggcggggccgggattcggcgagttcggacggacgatccgcttcctctatgatacgccctccatcaccggccaaatgattgccctcgacggcggccagcatcttgcctggcagacgcccgatgtggcggagattacggaatgaattcaaggaagctgccggatggcggcgttctttacgacgaaaatgacgagaccgacgacgatatcgaggtggaaagcgaaagctctgcctcgcccgtcggcgcgccagctgcctctgccatcgactggaacgagggcggcagcaacgagaccgggcttgtcggcgccgacctgatcgcggaattcgtcaagcggctgccgaacagccccggcgtctaccgcatgttcaacgaggccggcgacgtgctctatgtcggcaaggcacgcagcctgaagaagcgcgtgagcaattacgcgctcggccgcgtgcactccaaccgcatcgcgcagatggtgcggcagaccgcgcatatggagttcgtgacgacgaggaccgagatcgaggcgcttctcctggaagccaacctgatcaaacggttgcggccgcgcttcaacgtgcttttgcgcgacgacaagtcgttcccctatatcctgatatcaggcgaccatcgcgcgccggccatcctcaagcatcgcggcgcccgcgcccgcaagggcgattatttcggcccctttgcttcggccggcgccgtcggccgcacgatcaactcgctgcaacgcgccttcctgatccgcacctgcaccgacagcgtcttcgaaacgcgcacccgcccctgcctgctctaccagatcaagcgctgttcggcgccctgcacgcatgagatcagcgatgcggggtatggcgaactggtgcaggaggccaaggacttcctttccggcaagagccagaaggtgaaggcgcatatggccgaggcgatgaacgaggcggccgaggatctcgatttcgagcgggccgctgtctatcgtgaccgccttgcctcgctgtctcatgtgtccagccatcaggggatcaaccccgccggcgtcgaggaagccgatgtcttcgcgatctaccacgagggcgggatttcctgcatccaggtgttcttcttccgcaccgggcagaactggggcaaccgcgcctatttcccgaaggccgatccgcagctgacaggggccgaagtgcttagcgccttcctggcgcagttctacgacgacaagccggtgccgaagcagatcctgctttctgaaacggtggacgagatggagctgctcgccgccgccttcgccgagaaagcgggtcacaagatctcggtgctggtgccgcagcgcggcgagaagcgcgatctggtcgatcacgtcatgggcaacgcccgcgaggcgcatgggcgcaagctcgcggaaaccgcgtcgcagtcgcggctgctcgaaggcttcaaggatacgttcaagctgtcctacgtgccgcagcgcgtcgagatttacgacaactcgcatatcatgggaacgaatgccgtcggcggcatggtcgtggcggggccggaaggcttcgtgaagaaccagtatcgcaagttcaacatcaaatcgaccgacatcacgcccggcgacgacttcggcatgatgcgcgaggtgatgacgcggcgattcacgcgactgctcaaggaagaaggcattccggacaggagccagccggtcgcggcggctgatgccgccgacatgcccttccccgcatggcccgacgtgatcctgatcgacggtggccaggggcagatgacggcggtgcgggcgatcctggaagaactcgggatcaccgacagcgtgatcgccatcggcgttgccaagggcgtcgaccgcgatgccggacgcgagcgcttcttcctgcccggcggcgaaagcttcacgctgccgccgcgcgacccggtgctctactttacccagcgcatgcgcgacgaggcccaccgcttcgccatcggctcgcatcgggcgcggcgcaagaaggagatggtcaagaatccgctggatgagatcggcggcatcggtccatcacgcaaacgtgcgctgctccagcattttggtacggcgaaggcggtttcgcgggcggccttggcggatctgatggcggtggaaggcatttcggagacggtcgccaagcaggtttacaatcattttcacgacgacgccgcgaaataggcggcagcagtcgcaaattccacgcaaaggcagcgaaaaaacagaaacaatgttgacgctttgcacgcaaagccgtcatctacgagcgcatcaaatcagagaacagttcatggcatcgcgcgcatacaatatccccaacctgctgacttacggccgcattctggccgttccgctcatcgtcctgtgcttcttcgtcgaaggaaaactgtcgatcagcaataccgcccgctgggttgcgctgtggatattcgtcatcgcgtcgatcaccgattttctcgacggctatctcgcccgcatatggaaccagacgtccaacatcggccggatgctcgacccgatcgccgacaagctgctggtcgcctcgatccttctgcttctggcggctgaccagaccattgccggctggtcgatctgggccgccatcaccattctttgccgcgagatactggtctccggcctgcgcgaatacctggcggcgctgaaggtgagcgtgcctgtgacgcgcatcgccaagtggaagaccacggtgcagctggtggcgatcgccttcctgcttgccggtccggccggcgacgagatcttcccctacaccacgatgaccggcatcgcgcttctctggctcgccgccatcctgacgatctataccggctatgactacttccgcgccggcatcaagcacatcgtggaaaacgacgaatgaccaagctcatctatttcgcctgggtgcgcgagcggatcggcaaggccgaggaggacatcgcgctccccgcttccgtcgtcaccgtcaccgatcttctcgatcatctgaagacgctcggcgaggaatacgagaccgcgctgcagtttcccgacgtcatccgcgtcgcgctcgatcaggagcatgtggagcacgacgagccgatcggcgatgcccgggagatcggtatttttccgccgatgacggggggctaagttcatgactgccgtgccagtcagcccccctctgccctgccgggcatctcccccacaagtggggagatcggctgggctcgcccgatcgagcacacaaagaacaccgctgcaaaacgcacgggcaaagcggcgcgaggtgcaagcaacttgtgatctccccacctgtgggggagatgcccggcagggcagaggggggcccacgcggcacatcctatccgcgaagccaggcattctctgatgagccctaccccaaccatccgcgtccaacgcgaggatttcgacctgcaggtcgaagtcgatctgttgagcaagggcaagccgggtatcggcgcggtcgtcaccttctccggcttgtgccgcgacgaaggcgggacgctcgatgcactggagctcgagcattatcctgggatggccgaggcggagatgacgcggatcgcggagatggcgatcgagcgtttcgagctgataggcctaacggccattcatcgctacggaaagatcgcggcaggcgagaacatcgtgctcgtcatcgccgccgcgccgcaccgccaagcggccttcgacggcgcgaacttcgtgatggattttctgaagacgtcggcgcccttctggaagaaggagcatggcaaggacggcgtcgcgcgggaatgggtcgaggccaagcggcacgacgatgccgcgcgcgacaaatggaagtgactacgggatcacccgctcgcgccgactgagcaccagcagcaacacaagcagcgaaaagaccaccaagtcgcgccagaggaacgggccgtaggctgtccacaatgtctcggccagaccgagaccggccgcgccgcccgccgatttcagtgggtccgaataaccgccgacggcggccaccatcagaaccttcagcccgaacatcagcccggcgccgaagtccatcgtgccgtaataggcggtggagaggatgccgcacagcgttgccatcagcacggctgccgcgtaggccacgaggaagacgttgacggcgctgacgccgcagagttcggcggctttgggatcgtcggtgacggcgcgccaggcgcggccccaggatgtccgcttcaggatcacggcgccgatcgccacgaacacacccatcagtgccgtgttgatcagttgcatctcggtcagcaccacctcgaagccggcgctccgccagaagacgacatggccgttcagaaacggcgacagccagaggctgcgggtgtcggatgccaggcgcgcggtctccatcagcaggatggtgacgccgagcgccgcgacgatgacggtgttcgaggactggcgcaccagctgcagcatgaccgagcggccgatccagacccccgcccccaccgcatagaccagcgaggccacagcgccgagcgcgagcgccgcgggcaagaccagccagagcctgttgtagccgaaatcggtgaagagcagcagcatctgtcccgaaaaggcgaagagcgccccataggtgatgtcggggcgcttggtgacgccgaatgccaccgcatagccgaaggccagcgcggcatagagggctgccagcggcaccgcattcgccagttgctgcaagagataggccatcgacatatcctatttcgctgaaatcataactggcaaaattgcttttaccagttatattttacctatgaccttctcgtggacccctcatcgcttttccggcggcgtgctcgcattcgatgtcgccaacagcgtcgtgctgcgacacgacgaggcgcgccgcatcgatcgctttgccgtcgatgcgcaactgcaggcgtttccgcgagccgccgcgaatttctgcgccgaacgggcgatctttggggacgttgcgccggtttcggcggatgacaggcaggcgttcattgatctgcgcgaggcgaccgaccgctattttcgcgaccgcgttctcgccggtggcagcgatggactgctggcggacttgttggaggcggcagcggtcgtcctgcgtggcaactccgatgccgccggcatcgatcgcgccaccgcgcattcggtgctgaggctgatcgcctcgcccgaaccggagcggatgaagatctgcggcaattgcggctggctgtttctggatcgcagcaagaacagaagccgcacatggtgcgacatggcggtctgcggcaaccgcgccaaggcgagcaagcactatcggcgccggaaagaggagaacggctcatgaaaacgcttggagcggccctgctatcggccatgctggcgctgacggcctgccagcgtgagagcgacacgctcgcagaggtcagcggccatatcttcgtgttcaactaccgcgtcgcgatcgccacctatctggtgacgctgaacaagaaggcgccgctgcctgaaggcgcggtggcgatcgccgaattcgaaaatccggccggcggggcgccgcttgtggtcaacgagaagatcttcccggcctgggacaagatcagcctgcaaagcccgccggtgcactgcgtcaagaaagacaagccctacgccgtcagcatccggttggtcgatgccacaggaaaggagttgcagagcctgaagacgacggtcacatccgatgtcgaccagtcgatcatgccgggcaagccgctcgtggtcgggccgctttacacccgaaatcccgaagtgttcaaagcggacggaagcgtcgattatcacagcgacgagacctgccccaagacgtgaaaaagcccggcgcggtggccgggctttcggagtcatttcaaaaggttcagcccgcgggctgagcttttgaatcagccgacgatttcggtttccgcgaaccagtaggcgatttcctgaacggcggtctcgggagcgtccgaaccgtgaaccgagttttcgccgatcgacagcgcgaactgcttgcggatcgtgccttcgtcagcgttggccgggttggtggcgcccatgatttcgcggttcttcaggatggcgttctcgccttccaggacctgaacgatggtcgggccagaggtcatgccttcaaccagttcgccgaagaaggggcgttccttgtgaacggcgtagaagccttcggcttcgcgcttggacatccatacgcgcttggaggcgatgatgcgcaggccgttgtcttcgaataccttggtgatggcgccggtcaggttgcgcttcgttgcgtccggcttgatcatcgagaaggtgcgttcaatcgccattgtaataatcctcattcatcggggaaaagtgggcggtgtttacccgtccgataggctgaaaacaagggggttgcgcgaatttcacgcggtcgtcacagagcgggacagtttgacgcgaggcgatgaaggaatttcttggtggcatcagaaccattgtcgtgtcagcgacttaggatagaacggatcaccagatggaggacagaatgctgaaacaatacgcgatgttcgcggattacaaccgctgggccaatgggctggtctacagggctgcctcggagctgacggacgccgaataccgcgaaaaccgcggcgccttcttcggctcgctacacgcgacactcaaccacatcctgtcggccgaccggatctggatgaagcgctttaccggatcgggcgacgcgccgacgacgctcgacagcatcctttacgaagacctcgagacgctcagcgcggcacgtgagcgggaggatcgcaggatcgccgactgggtcgatacgcttgatgccgaggcgctcgcgggcacgttcagctacacgccggttactcgcccgggtgcgatcacccagccgctctggccggcgctgtcgcatcttttcaaccaccagacacatcatcgcggccagtgccacatgaccttgacggcgctcggcaagcccagcctgtcgctcgatctcagctacttcctgcacacggagggcaaacgatggctgagcgcatgatctcaacgccgcattaaccgcgttggcgaaatcaaggaaacagatttactcggcaaaggtgcaaattcaggccatcttaaacagtccgatgcataggggagagagagaggccggacagggccgacgagcgaggagtgcaacatggcaagtgcagcatcgagcccgcaggcgcaacgcgaggcatcccgtccggcaccggtcacggatattcagcggatcagccagcatatgacgcgtctcggcgtttccggccttccgcgcaattacgagctgtttcacgaggcgatcgtcggccagaacgccgcgctggcccaggatatcgcctcgctcggagccgcgccgcgccagccatcgctcgatgaactcggcctcaaatatcgcctcgtcagccattgcgggctggtcggagagacctcgcaggccgagatgagcaagatgatgcgcgatgctgtcgagcgcttgacggcgggcgtaaggcagaagcagattttcatgcgcgcggcggaaaccgcgctgaaatcgatcaccggaaacccggaccagagcctctcgtccttcatgagcgagatggaattcctgtcgacttcgctcaacggtctcctgaccgccgagaccgacctcgagatcaagctgcgccacgacgtcgatcggatggaagcgctcgagcgtggggtcgccgcggctcaaacggcgtcctctaccgaccgtctcaccggccttcccaatcgcaccgcgctcaacaggaccgtgctcgatctttatgagcgcgaggaaggttcggccggaagcgcgctgatcatgatggatatcgacgacttcaaggcgctgaacagccgctacggcacgcagaccggcagccgtcttttgaaaaagctcgccgatctgttccgcaagtcgatcaagaagcacgacttcgtggcccgtaccgatggcgacgaattcaccttcgtgttcgccaatgtcggcatgcaggaggccatggcgatcgccgagcggctgcgcaattccgtggaagagaacgtggtcttcgcgacctcggacgccggacagaacgccaggctgacggtgtcgctcggcatcgcattgagcgccgacgcggcgacggcttcgcagttgcaggccaatgcacgcatcgcgctgcatgccgcgcaatcgaacaggcgcctgccggtgcaggccttcgggcgctgagaggccatttcaagctcttgcgctgatcgcggctttcggccaaaacgccggacatgatcacgattagcgatatctccgcccgcattgccggccgcctgctcctcgaccatgccagcgtctcgctgcccgcgggcacgaaggccggcctcgtcggccgcaacggcgccggcaagtccaccctgtttcgcatcatcaccggcgatctcggggccgagacaggatcgatcacaatccccaagaacgcgcgcatcggccaggttgcccaggaggcgccgggcacggaagattcgctgatcgaaatcgtgctgtccgccgacaaggagcgcagcgccctgatggcggaggccgagaccgccagcgacccgcaccgcatcgccgaaatccagatgcgccttgtcgacatcgacgcgcactcggccgaagcgcgagccgccagcatcctgtccggcctcggcttcagccaggaggcgcaggcgcggccggcatcgtccttctccggcggatggcgcatgcgcgtggcgctggcttcggtgctgtttacagaacccgatctgctcctgctcgacgagccgaccaactatctcgacctcgaaggcacgctctggctcgaggattacgtgcggcgctatccgcacaccgtgctgatcatcagccacgaccgcgacctcctgaacaatgccgtcaactcgatcgtgcatctcgaccagaagaaactgaccatctatcgcggcggctacgaccagttcgagcggcagaaggcggaagccgacgagctgcagaccaaggcgaaggcgaagaacgacgcggcgcgcaagcatctgcagagcttcatcgaccgtttcaaggcgaaagcctcgaaggcccgccaggcgcagagccgcgtcaaggcgctggaacggatgggcaccgtggcctcggtcatcgaggatcacgtgcagccgatcaccttccccgagccggaaaagcagcccgcctccccgatcgtcgccatttcgggcggtgccgttggctacgagccgggcaagccgatcctcaaggggctcaaccttcgcatcgacaatgacgaccgcatcgcgcttctcggctcgaacggcaacggcaagtcgaccttcgcgaagttcatctccggcaggctttcggccgaaagcggcgaagtgaagctggcgccgagcctgaagatcggcttcttcgcgcagcaccagctcgacgacctcatccccgaccaatcgccggtcgagcatgtgcgccgcctgatgccggaagcgcccgaagccaaggtgcgggcccgcgtcgcgcagatggggctggcgaccgagaagatggcgacggccgccaaggatctgtccggcggcgaaaaagcgcgcctgctgatggggcttgcggccttccacgcgccgaacctgctcattctcgacgaaccgaccaaccacctcgacatcgacagccgccgcgcgctgatcgaggcgctgaacgactatgacggcgccgtcatcctgatctcgcacgatcgctacctgatcgaggcgaccgtcgaccggctgtggctggtcaacaatggcacggtcaccaccttcgaaggcgacatggacgagtatcgcgatctgatcgtcgcctccggcaagaagaaggacgagaagccgcaactgctcgaggagacagcgaccaaggccgaccagcgcaagctcaatgccgaccggcgcgcctcgctcgccccactcaagaaaaagatcaacgaaatcgaatccttgacgggcaagctggagaaactgattcagggtcttgatgcggaacttgcggatccggtgctctacgagaaggcgccggccaaggccgccgagaaggcaaagcagcgcggcgaagcggccgccaaactggccgcggccgaagaacaatggctggagctttcgtccgaatacgaggaggctatggcaggatagccacagccgttacccaagcgcccggaacctaacatttgtcagcgcgcgggcgagcgaaagaaactgatcgttaaccataatcctcaaggttgtctcaacattcattactgatttgttgagacactcttcatgcaccgcttcgccctttacgccggccttcttttgtccgccgcgctcgccggctgccaaacgacaaagcagcccgcgcccgacacgacgatcaagacttcgtccatcctcgcgcccgaaggcagcaagaacacgatccgcggcgatacagccgagcgatccggatcggtcgtatctggcaagcagcaccatctcgccggacggacgatgaccgtgtcgtcgatccgcgacatccagttgcaggacaaggaagtcattctcagcttcgacgatggtccgatcccgggccgtaccgaccgcgttctggcgacgctcgacgagttcggcgtgaagggcgccttcatgatggtcggcgaaatggcgaccttgcatcccgacctcgcccgcaaggtcgcagccgatggcaatgcgatcgggagtcacacctacaagcacgacaacctctccgcactgaccttcgacatggcgatggccgaggttgtgcgcggccaggcggccgtgaccaaggccaccggcgtcgacgtcaatttcttccgcttcccgtatcttgccgacagctcgaagcttcgctccgcgatcggcattcgcgacatggtcgtgatggacgtggatgtcgacagcaaggactatttcaacacgacgcccgccgccgtgaccgagcgaacgctcgacctcgtctacaagcgcggacgcggcatcattttgatgcacgacatccacaaacgcacggcgaccatgcttccgacgctgctctccaagctggaggccgatggctacaaggtggtgacgctgaagttccagaagccggtcgcgccgaccgtcatggcatccctgtaattcgcaggtgaattccagacccgcgacagacgccgacgcttgcccgtcggcgtctttctgctacaacagccgccaataatcatactattgagcgaaacaccgaacgcgagccaagagcatgtcacccatcaacctcgccatcgttggcgtcggcaagatcgtccgcgaccagcaccttccctccatcgccaagaacccggacttcaatctgatcgccacggcgagccgtcacggcacggtcgatggcatccagagcttcaccacgatcgaagcgatgctcgacgccgtgcccgagatcgacgcggtgtcgctgtgcatgccgccgcagtatcgctatgaggccgcccacaaggcgctttcggccggcaagcacgtgttcctcgaaaagcccccgggcgcgacgctgagcgaggttgccgatctcgaggcgctcgccgcctccaagggcgtctcgctattcgccagctggcattcgcgctacgcggcggccgtcgaggcggccaagtccttcctcgcatccacgaccatcgaaagcgttcacgtcgtctggaaggaagacgtgcgccagtggcatccgaatcaggactggatctggcaggctggcggccttggcgtgttcgatcccggcatcaacgcgttgtcgatcgtcacgcatatcctgccgaaggcgatcttcctgacgagcgcgacgctggagttccccgagaaccgcgacgcgccgatcgcagccgacctgcacttcaagaatgccgacaacgtccccgcgcatatcgagttcgactggcgccagaccggcaagcagagctgggatatcttcgccgagacgacggctggcaagatggttctggccgaaggcggctcgaagctctccatcgacggagaactgaagttcgaggcgccggaagaggaatatcccgcgctctatcgccgcttcgcggagatcgtcaaggccggcaagtccgacgtcgacctcgcgccgctgcgccacgtcgccgatgccttcatgctcggccggcgcaaattcgtcgaagccttccacgattgattcgaaattgccgaacctcgtgatacattaaggtcatcttgggtatctcagaggttcggcatgcgcgacgatgaagcgttcggtctcgggctgaagaacctgacggtctcgctctccgacgccaacacgctttggcacgacgcttacgaggaagaggccgaggcgatccgccaggcgctcggcgacaccgtcatcgacatccagcacgtcggcagcacgtcgatcccatcaatcaaggccaagccgatcatcgacatcatggtcggcattcggtacttcgccgacggcccggcctgcgtcggcgcgatggagagcatcggatacgattatgccggcaccgatctcgttcccgacgatcacatcttcgggcgcggcatcaagggcgagacacgaacgcatctcgttcatgtcgtggaatatcacggcgagaactggaaccgcatgctggcgtttcgcgatgcgctgcgcgccgatcccgatcttgcccgcgcctatgagcagctgaaggtcggcctcgccggcacgcatgcggcaagccgggcggagtatacccgcgcgaaacacgatttcatcgagaaggtggtcaaggatgccggggttggctgatccagctaggagctatacgggctagctctgcgggcctatgccttcttttcccagcgaccttccggcgtctgctgccaatatgtgaggctgtgcccctcgcctttcagcttcttccactgggcccgcgcgccatcgagctgttcctgatcgtagccatcgaacatgaagacgacccgctcatatggatcgagcggcggcggctcggcgccggcgacgatgaagcggacggtcgcgccgttgatgttgtcgtcggtgatggtcaggaggaccggctggttgccggccagttccccctcatccgtgccgtgcggcaggaagctgtcctcgcgaaaggtccagagatgcgcatcgagcgcatccctgtgagccgtttccttcatctgaaccgcgacgcgccagccgcgctcgacgcttttgtcgagcaaaggcggaagcgcgtcctccagcttggattcggtcagatggtagaacaggacctcggtcatgattcgtagttggcccgcaccagctgatcgagcagccgcacgccgtagccggaaccccaggattggttgatctcgtcgagcggcgagccgatggcggtgccggcgatatcgatatgcgcccagggcgtgtcgccgacgaagcggccgatgaagtgggcggcggtgatcgagccggcgtggcggccgccggtgttcttcatatcagcgaacttgctgtcgatcatcttgtcgtattccttgcccatcggcatgcgccagagacgctcgtgggtttcggttccggcgatcgccagctgctcggacagcgtgtcgtcgttggaaaacaggccggcctggatgttgccgagcgccaccaggatcgcgcctgtcagcgtcgcgagatcgatcatgaaccgtggcttgaaacggtcgttgcaataccagacggcatcgcagagaacgaggcggccttcggcatcggtgttgatgacctcgatcgtctggccggacatggaggtgacgatatctcccggacgctgcgcgttgccatcgggcatgttctcgaccaggccgatgatgccgacgacattcgccttggccttgcgggccgccagcacgtgcatgaggccggtgaccgcggcggccccgcccatgtcgcccttcatgtcttccatgcctccggccggcttgatggagatgccgccggtatcgaagaccacgcccttgccgatgaaggcgagcggcgcatcgccgttcttgccgcccttccactgcatgaccgccaggcgcggcgaccgcacggagccctgcgcgacaccaagaagcgcacccatgccgagcttgctcatttccttttccgtcaggatctcgacctcgacgccgagcttttcgagttccttgaccttggcggcgaattcaaccgggcctagtacgttggccggttcgttgacgagatcgcgtgcgagattgacgccatcggcgaccgcctgcgagaccgcgaaggccttcgccgcttccgtggccttcgccgtgacgatgcgcaccttgaccggtccgttgccgtccttggcgttgttgtcgtcttccgacttcttcgtcttgtaggtgtcgaaaccataggcgcgcaacatcatgccgagcgcgaaatcggcggcctgcgcggcgttgacgtccacgcccggcgcatccacgaaaacagtcacatccgtcgtgtttttgatcttcgaggcggcggcgccgccggccttcagccagtcgaaggacacgaggttgtccgccttgccgaggccgatcacaaagagacgctcggccttcgatccctcgggtgccacgatatcgagcgcgccggcaagctttgccgagaacccggcgatcctggcggccttcgccaccacgcccgacgggtcggcgacgctcgcgccagcggcgaaatccgcgcccttggcctgcaacagaatggcgtatccaccggcaatttcggcagatttttcaaacgaaatatcgaatttggctgacatgtcttctccagtgggatcgctataaatcctctgccccgatcattcaggttttcactgtcgaaaacaagtctccgtcgcggccaacgcgaccgggatcgcgggcgttgcgtcaacaaggcgtcatgcaagacgactattgatcccggcgaatcgacacgacggggatcggtcttgaactcgatattgaagactttcagtccgattgccatgcgcgaaacgcgttacggcgcgacggacatattcaagttcctgctcgtcgcctggttcgtgcttcttgccatcttcaatctgtttcccggtatcgatcagggcgtctcaacgtatttcttcaccagcgcggcctgcgatgccggcgcatcgcttctcaaggtttgcgggtatttcccctatcgcgaggagttcggcctgcaaatcctgcgcaccatctttctgcgccttccctatctggcggcgttcgtgctgttgtggaaactcgtcgagtgttacggccaattcggcgccaccttcgacgccgatcgcgcccgcgacctgaagatcgctattggcgcactgatcgtcggcccgatcattctcgtcaacttcatcctgaaaacgtactgggggcgccctcgccccttttccacgatcgatttcggcggcgcgctcgacttcgtttccgccggatcgacgaccggcaaatgcctgtccaactgttcgttcgtttcgggcgaagccgccggcgccggctggttgctctgccttgtcttcatcatgccgcgcgcgtcgcgacgcgcgctcttcctgccgctggcggcgatttcgttgttggcgccggcattgcgtgtcgccttcggggcgcactatctgtcggatgtcgtcctcggatggttgtcatccttcgttgtttttgccggcatcctggcgctgaccgattcgccacagcgggaaaaaaaactgaaaattgaatgaattttcgaccctagcttgtcgcaaaagccaatcaaagagcgtagatggatttcgctgcgtggcggcaagaattcgcgaagagcgttcaagggcgtgcatgaaactgcttgaaacatatatattgcggcgcgtgggccagatgtttctcgtcgcccttttgcctgtgctcgcgattatctggacgacgcaggtcctgcagcgcatcaatctggtgacggatagcggccagtcggtcggctccttcgccaagctcgccacgctcatcctgccctcgatcattcccgtcgttctgcccttcgcgcttgttatcggcatcacgcagacgctgaccacgatgaacaacgattcggagcttgccgttatcgatgccgccggcgcgcgccgcggcatcatctggcgcccgatcatcattctcgcggccgtcatcagcgccttctcctttctcgttgacaacgtggtcgagccgaaggcaaagaccggcgcaaggcaaatgatcgcagcggcttacgccgatctgctgtcgaccgtcatcgaagagaagaacttccgccagatcgattccggcctctatgtgcagatttccgaacgcctggccggacgcgttctcaagggcctgttcgtagtggacgagcgcgacccggcgttccagctgatctactacgcccgcgaaggcgcggtcgacgagaagggcacgtcgctgatcatgcgtgacggcgaagtgcaccggaaaacgccgacgggggatgtgtcgatcatccgtttcgccgcctattcgttcgacctttccgacctgacgcagaatcgcggccagtccacgcttcgcgcatcggaccgtgaactgcaattcctgctcaatcccgatccgacggacaaggactacatcgccaagcccgatagctatcgcgccgagctgcacaggcgactgaccgactggatgctgccaatggtgttcgcgttgatctcgcttgcgatcgccggtgacgcgcggtcgcatcgcgaggcgcggctgcacccgatggtgtcggcgctcgtcatcgctttcgcggtccgatgggcgaccttctatgccgccaaccagatcgaatcgaagccgattttcatcggcatcctctacgcgctgccgctagggatcagcgcgatggcgatcgtttcgctggtgctgcacaagcgaatctcgctgctgggcatcatcggcaactgggtcgctattttctggcgcaagctgcagcagcgcttgccccgctcgtcgggaggtggcgcatgattttcggtacgctcgggcgctacttcttccgccgctacgcaacgaccgcgatgtggttctttctcggtgtcgtcggcatcgtctacctggtcgatttcagcgagaccgcgagccgcatgtcgggtcttccgggctatacggtaaccggcggattgctgatgacggccgtgcgcctgccgctcatcctgcagcagactgtccccttcatcgcgctcttcgtcggcatgaccgtgctgatcggcctcaaccgcaaatacgagctcgtcgtgacacgcgccgccggcatctcggtctggcagttcatgtcgcccttcatcgccggcgcgttcctgctcggcatcggcgtcatgacgattctcaatccgctggcggcctggggacagcggcaggcggcaagcgtggagagcaactggcgcggcgacaacggtgcatcgaggggcgcgccccaggttccgtggatccgccagatcagcaatcaggacgatgccatcatcggcgcgcgcagcgttgtcgagggtggaacgctgctcgtcgacgcggtgttcgttcacttcgattcgagcaatcgcatcatcctcaggcaggacgcggcgaccgcaaaattggaagatggttactggcttcttaagaacgttaccgagcgtcgcccgggcgaaatcgcggaacgtaaggaagaggtacaagtccgtaccagtttgaaacgggatttcgtcgaacagcggcttaccgcccctgaaaccattgcatttttcgatctttcgagccgaatcgaaatcgctaaatccttcgggattccgaccaaggctctggagacacaatttcactctttgttgtctcaaccactgttgctcgtggcgatgactctcatcgctgcaacagtgtccctaaaatttagccggttcaaccaatcgaggtccgtgattctgggtggcatcctggcgggcttcgtgctttatgtggtcaccgtgcttgtgaaagcattcggaagcagtggggttgtcccgcctttcgtggcgacgtggattccggtcatcgtcgccttggctttgggtgcaacaattctgcttcatcaggaggatggctagtggcggcaggcaaccgcaaaagtgttcgtaagcagttggttgccctgttcgcaggcgtagccctgtgcggctataccggcaacatccccgttgccatcgcgcaagacgctttgcaaaacatgaagcccgatgtctcgaaggaagccaagatgcttctttcggccaatgagcttgtctataacaaagacgcagaggtcgtttcggcagtcggcggcgtgcagatcaattacgccggctacaagatggtctcgcagcgagtcgagtacaatcagaagaccggccggatgatggcgctcggcaatgtcgagctcgtcagccccgatggcacgcgcatgtattccgacaagctcgacgtcacggacgacttcgcggacggtttcatcaattcgctgcgaatcgagacccccgacaacacccgcatcgtggctgaaaccggccagcgggtcggtggcaacgagatgattctgaacaagggcgtctacaccgcctgtctgccctgctcgcaaaatcccgagcgaccaccgttctggcaggtgaaggcggaacgcgtaatccaaaacggcgagaagcgcacgattcgcctcgaacgcgcgcgcatggagattcttggctatccgatcgcctatgttccgtggctcgtcgttcccgacaataccgtgaagcgcaagtcgggcttcctgttcccgagcttcagcaccgcgcagaatctcggattcggcctgtccgtcccctactactacgtgatctcgcccagcatggacgcgacggttacgggtacgggctacacgacgcagggcttcctggcggatgccgaattccggcagcgtttcgagaacggcacgcatacgctgcgcgtggccgggatcaaccagatgaattccagccagttcactgcaggtactagcgacgccgagaacgacgcgcgtggcctcgtggcgtctaagggtgcattccagatcaatccccgctggaccttcggctgggatgtgatggtgcagagcgacaacaatttcgcgcgcacctataatctcaagggcctcaacgattcgacccgcaccaaccaggtctatttgaccggcctcgggaagcggaactacttcgacatgcgttccttctatttcgacgtgcaggacgccgatccttcgagcaccgccgaaaagcaacaggcgatcgtctatccggtggtggactatcgctacatcgcaccgcagccgcttgccggcggcgagctctcggccgatgtgaacttcaccaatatctcgcgcggcaaggacgatttctacgacgtcgccggcttcgatcgcttccgtggcctcgaaggccagacatcgcgcctgacgggcgaactgacgtggaagcgcaccttcgtaacgccggcaggcgttctgatcacgccgctgttgtcggcgcgcggcgatgcgctggcgctgaacatggacgatcccgccggttatgccggcaactacgacacgagcgatgccgcgacgcgcggcatggtgacggcaggcctggaaatgcgctatccgatcctggccaccaccgaaaacagcacgcacgtgttcgagccgatcatgcagatctatgcacgtccggacgaatcgctggccggcaggcttccgaacgaagacgcgcagagcttcgtcttcgacgcgaccaacctgttcgaacgcgacaagttctccggctacgaccgtatcgagggcggcacgcgcgccaatgtcggcatccagtataccggcaccttcgacaacggctacaagctgcacggcatcttcggccagtcctaccagctgggcggccagaattcgttcaccaccgacgacctcgtcaatgtcggtgccgattcaggcctcgaaaccacgcggtccgactatgtcggcctcggcggcatcgagacgcctcagggcttcgccttcgccgcttcgtatcgccttgacgagaagaccttcgaacttcgccgcggcgacctgacggccggtttccagaccgacacgttccagagccagcttctctacacgcacgtctccgcgcagccggaatatggcttcgattcggataacgacgaaatccagacgcgcgcgacggtcaagttcaaggattactggtcgatcttcggcggtatcgcctacgatctgaacaacaacacgttcacgcgccagaccatcggcctgacatatgaagacgagtgcacgatcttcacgatcgcctactccgacaagcgcgacaccagcgatcagtcggcgagcgactggacgatcggcgcgagactgacattccgcacccttggcgacatcaatctcggtgacgccagcgaactgggctacggaaacatctacaacaactgatcgattttgcagcgcggcgagagaaaggggcctttctttcgccgcaacgctgtgcaggacattgtggccattggatatatgcggcatatgctgctgcgtctcgaaggcggcaacgctgacgttatctcggtaagataggcgcgccgcaacgcgaaagcgcggcgtcaatgggaagggtcgacagatgattggcgcgaagaacaccgtaagaacgatgatcgcaggcttggcgttcgccgccgtcgcgggcttggcgttgcctgaggccaacatggcctatgcagcaagcgaagtgcgggtggtcgtcaacggtaccgcactcaccagcggtgacgtcgccaagcgccaggctttcctgcgtctgcaacgccagaaggccgatgccaaggccgccgaagatcagctgatcgagcagaccctgaagcagcaggaaatcgcgcgcgttcgcatgtcggtgtccaaggacgacgtcgatgcgtccttcgcgcgcttcgccagcggcaacaaactgacgccggcgcagatgacgcagattctcagccaggccggcgttggcgtcgaccacttcaaggcgttcatcgccgtgcagatgagctggccgcgcctcgtgaacgcccgctacggcaacagcaaccggatgtcgaacgccgacctcgttgcccgcatgatggaaaacaacaagcagaagccggaaaccaccgagtatattctgcagcagatgatcttcgtcgttccggccagcaagaagggcatcgtaggaaagcgcaagagcgaagccgaagcctcgcgctcgaagtatccgggttgcgaacaggccaaggttttcgccgccacgatgcgtgacgtatccgtgcgcgacctcggccgcctgctcgcgccggaactgcctgcggagtggaagccgctcgtcgaacaggccaagggcaacaccacggcgacgcgcgttaccgacaagggcgtcgaatatctcgcgatctgcagccagcgccaggtctccgatgaccaagcggccgagatggtcttccgcgaagaggatctcaacaaggccaagggcaagaacgcgccgccggaaaacgccaattccaccaagtatctcgatgagctgcgcaagaaggcgcagatcgttcgccgctgatgccaatgacgctcgccttttcgcgcccgcttgccctgagccagggcgatcccgccgggatcggccctgacgtcacgctgatggcctggctccgccgccgcgagcttggcctgccgccgttcgtcttcatcggggatcccgatgtgcttgtcacccgcgcacggatgctggacctgacggttgcgatccgcgaaaccgattgcgccggcgccgtcgacgtctttgccgacgccctgcccgtcctgccgattccgacaggtgtcgaagtcaatgccggcgaagcccatgtcgcgacggccagagggacgatcgccgcgatcgaacaggctgtgtcgctcaccataagcggcgaagcgctcggcgtggtcaccaacccgatcgccaaatccgtgctttacgaaagcggtttccgttttcccggtcataccgagtttctggccgagctcgcgagccgcgcaaccggaaagccggtgatgccggtcatgatgctcgccggaccgaagctccgggcgataccggtcaccatccacatcccgatcaaggatgtgccgcaggcgctgacggctgagctgatcgtggagacgtgccggatcgcgcatgccgatctcgtccagcgcttcggcatagccaatccgcgcctcgcggtcgcgggccttaacccgcatgcaggcgaagacggcgccatcggcaaggaagacgccgacatcatccatccggcgatccagttccttcgcgccgaaggcatcgatgcgatcggccccctgcccgccgacaccatgttccatgatgaagcgcgcgcgcgctacgacgtggctgtctgcatgtatcatgatcaggccttgatcccggccaaggcgctcggcttcgacgatgccgtgaacgtgacgctgggcctgccattcatccgcacgtcccccgaccacggcaccgccttcggcatcgccggcaaggggctggcgcgcgaaagcagtctggtcgccgcgctgaagctcgccggacatctcgttcgcgtcggcaagagcaacccctgatggccgctctcgacggattgccgccgcttggcgacgtgatcaggcggcatggtctcgacgcgcgcaaggcgctcggccagaacttcatcctcgacctcaatctcacgcagaaggtggcgcgtaccgccggctcgctcgaagacgtgacggtgttcgaagtcgggcccggccccggcggcttgacccgggcgatcctcgcgctcggcgccaaaaaggtcatcgccatcgagcgtgatcctcgttgcctgccggcgctggctgaagtgtcggcgcactatcccggcaggctcgaggtgatcgaaggcgacgcgttgacgagcgatttcgaagcgctcgcgcccgagggaccggtgaagatcatcgccaacctcccctacaatgtcgggacccagcttctggtgaactggttgcttccccggcagtggccgccgttctggcaatcgctgacgctgatgttccagaaggaagtcgggctacgtatcgtcgccgatgaggaggacgatcactacgggcggctcggtgtcctgtgtggctggcgtacgaacgcgcacatggccttcgatattccgccgcaggccttcacgccgccgccaaaagtcacctcgacggtcgttcatctgacgccgaacgagaatcctattccctgctccgtcgccaatctcgagaaagtcacccaagcggcgttcggccagcgccgcaagatgctgcgccagagcctgaagccgatcggcggggaaaagctcctggagaaggcggggatcgatccccagagacgcgcagagacgctgtccgtcgaggagttctgccggctggcaaacagcctgtagaacccgcttaccgacatcatcgccccagcaaaatcaatttcaccggatcggcgaagccaaacggcttgcgatggcgccgcaggctattcgccgttgcgatgttacaaactcggctcttccgtcagcagaccgttgacgaaatcgaacaggccatgccgtcggtcgcggcgcacgcgctcggcattgacgatgcaactgacgttgcgaaatgcctcgtcgaggtcgtcgttgacgatcacgtagtcatactcacgccagcgttcgatctcggcacgagagttgagaagccgcgtccgaatgacgtcttcggaatcctcggcacgacggtggagacgagactgcaactcggtcatcgtcggcggcaaaacgaagatcgacacgatatcggccttcatcttttcctgcagttgcagcgcgccctgccagtcgatgtcgaacagcatgtcacgaccggctgccatggcggcctcgacgggctcgcgtggcgtgccgtagaaattaccatgaacttcggcccattcgagcagatcacccgcatcgcgcattctctcgaactgcgggacgctgatgaaatgataatgtttgcccgcgatctcgctcgggcgcttggccctcgtcgtcacactcacggagatctcaaggctatggtcgtccctcagcagattgccggcaatggtcgactttcccgcacctgacggcgaagacaggacgagcatcagcccgcgccgggcgatcttggtgggcgtgctcgacggggtcgggctcatggttcactccaaattctgaacttgctcgcgaaactggtcgatgaccactttcaactcaataccggccgctgtcacggccgcggtattggacttcgagcatatcgtattcgattcccggttaaattcctgtgcaaggaaatcgagcttgcggccgatcgggccgcccttggcgagcagatcgcgcgcggcggccacatgcgccttcaggcggtcgatctcctcgcgcaaatcggccttggtcgccaggatcgctgcctcggcatgaagcctgtcctgatcgaacttgccggatgcatccatcaacatcgcgacctgggccgcgagccttgccgcgatctcgcgtggcgagcgcgacggatcgctttcaacgaccagcgtcaggcgctcgatgatcgccacctggtcgagaagcacgcgggacagggccgctccctcctgctcgcgcatatgcctgaggtcggtcagtgccaacgacaggccattcatgatctcggcatcgcgcgcggcaatcgcttccgggctatcctcggtctcgcgaaaatcgacgatgccgcggatgccaagaagcgtatcgagcttcagcggcgccggatcgatgatatcagccaactgatcgcgcagcgacagaacggccgcgagcgcttcctgattgagaacggtctcgacgcggctttcgggcgatgagacggaaagcgacacctgcatgttgccacgactgaactgctcgccggcaagccgcttgacgtcgttttccagccgctcgaggcccggaggcaggcgcaggcgcacatcaagccccttgccgtttaccgagcgcagttcccatgcccagcgccagcgatcggtcgtgccttcgcgccgcgcaaaacccgtcatggactgcaaagccatggaagcctccgatatcggttagtttcttttctttttcggggccgcggcgggagccgccggcgcatcggcgggcgttgccgcatcgggctgcccatcgaccgcgatattgggatctgcgcccttgtctgcctccagcttgcgccagcgcttgacgttcgcattatgatcttcaagcgtcgtcgcgaagacatggccacccgttccatcggcgacgaaatagaggtcctgcgtcttccacggattggcgacggcctcaagcgcatcgcggccgggattggcgatcggcgtcggcggcaggcccctgatcacataggtgttgtaaggcgtttccttcctgaggtccgactgatagatcggcctatcggacggttttccatcaccgccgaacaacccatagatgatcgtcgggtccgactgcaggcgcatgccctttgctatccggttgaagaataccgaggcaacgcggccacgctcgtcgggaacgcccgtttccttctccacgatggatgcgagcacaaccatctcgtccttcgacttgagcggcagcgattgatcgcgcttgtcccagatctggtccaccagcttctgctgggcagcggccatctgctcaacgatctcggagcgcttggtgccgcgcgagaacttgtaggtgtcgggccgcaggctgccctcggcgggaagcacggcgggcagatcgccttccagcaccggatcctcgttcatgcggttgaacatctgacggacgctgaggccttccgggaacgaaatcgaatagagaatggacttgccggatttcagcaattccatgatctcgctcatcgaagcacgagccttgatctcgtattcgccggccttgaggctctcgccgtcgttcaggtgcgttgccgtgaggtagcggaagacgcggccgtcggagatgatgttgttgcgctcgagattgaacgcgatctcggtaatgccggcgccattgcgcacgacgaagttggtgttggcctccagcggaccggggttctggtaggcggaaatcgcgtaatagaagacgacgacggcgaccgcgcagccaagcacggcgatcgtcatcaggaagttcaggaagatgacaacctggcttctggccttcttggagcgcttcggcggctccggcacgcgctctgggcgcagcgcttcggtaggcgacttcggaatgatcgggccactctgcgactgctggccctgctggccggtcgtgtcgttgctctggttcgtatcgctcaccggcaatcctctaaatttagccccaaaagctgcttcttgcgaagcaatgcggcgaaatgcgggtgggcagccatctgattggactgccctgcccgttgcggacgtcgacggttagtctcaggcgacgtagcgacgcaacaccagcgatgcgtttgtaccgccaaatccgaaggaattcgacagcgccacgttcacttcccgttgacgcgccatgtgcggaacgagatcgatcttcgtctcgcgctcggggttgtcgagattgagcgtcggcggcaccacgttgtcgcggatcgacagcgtcgcgaagatcgcctcgatcgcgccggcggcgcccaggaggtggccggtggcggacttggtcgaggacatggaaatcttcgatgcggcgtcgccgaccaggcgctcgacggcgccgagctcgatcgtgtcggccatggtcgatgtgccatgcgcgttgatatagtcgatatctgcgggcgtcaggcctgcacgcttcagagccgccgccatgcagcggcctgcgccctcgccgtcctcggacggagcggtgatgtggtaggcgtcgcccgaaaggccgtagccgaccacttcggcgtagatgcgcgcgccgcgtgccaatgcgtgttcgagctcttcgagaaccacgatgccggcgccctcgcccatgacgaagccgtcacggtccttgtcgtaggggcgcgaggccctggtggggtcgtcgttgtgctgcgtcgacagcgccttgcaggccgcgaagccggcgagcgagatgcggctgacgggcgattcggtaccgccggcgaccatgacatcggcatcaccgaaggcgatcagacgggcagcatcgccgatggcgtgcgcgccggtcgagcaggcggtgacgacggagtggttcggcccgcgcagcttgtgacggattgagacctggccggatacgaggttgatcaaacggccgggaatgaagaagggagaaatgcggcgcgggcccttgtcgcgcagcgtgtagcccgcttcaacgatgccttcgatgccgccaatgccggagccgatgaggacgccggttgcaatctggtcttcgtcgctctcgggatgccagttggcatcgttgagcgccatgtcggccgcggccatgccatagatgatgaagggatcgaccttgcgctgttccttgggctccatccaatcatcctgattgaaggtgccgccggtgccgtcgccaacgggaatgcggcatgcgatcttggccggaaggtcttcgacttcgaactcggtgacgaggcgtgcgccgttttcacccgccagcaggcgagcccaggtcacttccgtgccgcatcccaagggagacaccattccggtgcccgtaataaccacccgtctcatcgactgcattcccccgccttttgtattctatggagaccatgccagaaataaaaagggcggactccgggtccgccctttttaaaatgctcaggattaagcctgggccttttcgataaacttgacagcgtcgccgaccgtcaggatcgagtccgcagcgtcgtcagggatttcaacgccgaattcttcttcgaacgccatgaccagttcgacggtgtcgagcgagtcagcgcccagatcgtcgatgaagcttgcgccttcgacaaccttgtcggcgtcgacgccaagatgatcaataacaattttctttacgcgttctgcgatatcgctcatgtcggtttcctcgaccttataatcctgatcagagtgcctttatggcaccctaccctgtttcagcctgcggcgccctaaagccaccttcggcaaactcgttgtacccggctaccagagatgtcccaggcttgcttgaaaagcccgccggtccgtcttctttctcgggagactgttcacagtcaaggcccgattaacacggtttatgtctgccgcaaagccagaaaatcaaccccatagggttggtgaacaggctattgcggggaaaaacggcccgagagccagttttccgtttcagatcatggccatgccgccatttacatgcaaagtctggcccgtcatgtaggctgcttccgacgaagccaggtaagcaaccgcggatgccacttcggcgccggtgcccatgcgcttcatcgggatcgcgcccatgatcgcatccttctgcttgtcgttcagcttgcccgtcatcgcgctttcgatgaagcccggcgcgacgcaattgaccgtcacgttacgggtcgcgatctcctgcgccagcgacttggtgaagccgatcatgccagccttggaggcgcagtagttggcctggcccgggttgcccgtgacgccgacgatcgaggtgatgttgatgatgcggccatagcggcggcgcatcatcggatgcgtcagctcgcgggtcaggcggaacatcgacgtcaggttgacctcgatgacgctgtcccagtcctcgtccgacatgcgaacgaagaggccgtccttggtgatgccggcattgttgaccagaatgtcgacgccgtcgagttcggcttcggccttgacgccgagcgccttgacttcgtcgcgatcggcgaggttcgccgggaagatcttgacgcggtcgccgagctcattggccagcgcctcaagcttttcgacgcgggtgccgtgcaggccgacgatggcgccctgcttgtgcaggatgcgggcgatttcctcgccgatgccgccagaggcaccggttaccagagccttgcggccggagagatcgagcatggaagtattccttgtaatcgttaaatcaatcaggccagaagagcggcaaccgccgcgtcgatatcagccggcgagttgaccgagatgccggtcacgttcttgtcgatgcggcgcgcaaggccggtcaggaccttgccggcgccgagttcgtaaagcgtggtcacgccgttggccgcgaaccactcgaccgtttcgcgccagcgaacctggccggtgacctgctcgaccagcagcctggcgatttcgtcagcgtcggtgacgggcgcggcgcgcacgttggcgatcacaggcacgaccggattcgacttcgcgacacctgcgagcgcttcgcgcatcgcatcggcggccggcgccatcagggtggaatggaagggggcggagaccggcagcaggatcgcgcgcttggcgcccttttcggtggcgatggcggccgccttttcgaccggcgccttctcacccgaaatgacgatctggccgccgccattgtcgttggcgatctggcaggcgccgagcgccgaagcttcctcgcagacggcgatcacgtcggcatgctcgaggccgatgatggcggccatggcgccgacgccgacggggacggcagcttgcatggcattgccgcgaatgcgcaacaggcgcgcggtatcggcgatcgagaacatcccggcggcgcagagggcggaatattcgccgagcgagtggccggcgacgtaggagaccttggccttgagatcgacgcccttggcttcgagcacgcggatgacagccatcgatacggccatcagcgccggctgcgcgttggccgtcagcgtcagcgtctcttctggaccgttgaacatggtctcggacagcttctcgccgagagcgtcatcgacctctgcaaaaacggcgcgcgcttcggcgaaattctcggcaagatccttgcccatgccgacggcctgactgccctggccagggaacgtgaaagcgatggtcatcctatgtcctttttatatggacccgcggtcatttcgcctccaattgacattctttccccgagagtcaagtgccggaggcctgcgttccaaggctttcgcgactgcaacaaagccgtagttttgctcttgcgcttgctcaattccagcctaaattcgcgccgtccttcaaagacctctttctttaagatcaccattaaggctcccgaatgaaacacaagaaacttggtcgcaccgatatctcggtgtccgaaatctgcttgggcacgatgacctggggttcgcagaactccgaagccgaagcgcacggccagatggactatgcgttcgaaaagggcgtcaacttcttcgacaccgccgagctttacccgaccacgcccgtcgcccccgaaacgcagggtctcaccgaacactacatcggcacgtggcttgaaaagaccggcaagcgcaaggacatcgttctcgccaccaaggtcgccggccccggacgcgcgtatattcgcggcggcgaaggcgccgacggcaagaatatccgactggccatcgaggccagcctgaagcggctgaagaccgactatatcgatctctatcagatccactggccggtgcgcggtcatttccacttccgccagaactggcactacgatcccttcaagcaggaccgcgccaaggcgctcgccaacatcaccgacatcctggagacgctgggcgagctggtgaaggaaggcaaggtgcgcacgatcggcctttccaacgagacgacctggggcacgcagaagtatctgacgatcgccgagcagctcggcctgccgcgcgtcgtcagcatccagaacgagtacaacctgctttaccgccactacgatctcgacatggcggaaatgtctcaccatgaggatgtgggcctgctcgcctattcgccgctcgcaggcggcatcctcagcggcaagtacatcggcggcagcgtacccggtggctcgcgtggctcgatcaacggcgacatcggcgggcgcctgcagccgctgcaggaagcgccgaccaaggcttacgtcgaaatcgccaggcgccacggcctggacccctccgccatggccatcgcgttctgcctgacgcgccgcttcatgacatcggcgattatcggcgcgacgaccatggcgcagctgacgaccaacatcgatgcggccggcatcaagctatcgagcgatatcctcgccgagatcgacaaggtgcatcgcgaatatccgatgccgatctgatatcggcttcgattgatgtttgacgacggccgccagcttgactggcggccgtcttcgttttcgatcatatcgacaggcgatgccgcgatcatccattggacgcttgcctttccgtgaaaaatccgtataagccgccctgttcgcaaaacccggtcttctggctggtggctgaacggagggccggtttcccacgggaaatcgttcggaacggaagcgttccagcctcccgtgtctccgctctcgaccgtctcggaacgcttttcttgcctgggttcacccaatcaggagcagtcgttgaggcttagccgccgaatatcgggttgaataaacgcaagaaaggcaaagctgtcatggctctttatgaacatgtattccttgcccgacaggatatttccgctcagcaggtcgaagccctcgtagaacagtacaagggtgttatcgaagctaacggcggtaaggtcgggcgcgtagaaaactggggcctcaagtccctgacctaccgcatcaagaagaaccgcaaggctcactacgttctcgtcgacatcgacgccccggctgccgccgtgcaggaaatggaacgtcagatgcgcatcagcgaagacgtccttcgctacatgaccatcgctgtcgaagctcacgaagaaggcccgtctgccatgatgcagaagcgcgaccgcgacgaccgcggcccgcgtgatggcgccgaccgtggcccgcgtcgcgaattcggcgatcgtccgccgcgtcgtgatggcgacttccagcgtggcccgcgtcccgatcgcgctccgcgcgaagaccgtgcataaggagaactgagaatgtctgaatcttcctccgcaccggtacgccgcccgttccaccgtcgtcgcaagacttgcccgttctccggtgcaaacgctccgcgcatcgactacaaggacgttcgtctcctgcagcgctacatttccgagcgcggcaagatcgttccttcccgtatcacagctgtttcgcagaagaagcagcgcgaactcgcccaggcgatcaagcgcgcccgtttcctcggcctgctgccgtacgtcgtcgcttaatcggccgacgagaccaaatcgagggaaggcagtgatgccttcccttctccctttcgcgatgggcgcggatcggaatccttaaaacccatgttgaggcattctgaaatcgattcggaaagcgccctctaactgcttgatgaagcaggacagcgaccatgaaaccatcgaatgcaaaaatgctgggcgtcggagcccttgccggactggtcgccgcgtttctggtgtttgccgcgggccggcagccgtcgtcgttcagcgccgttctctatgccgcttccgcgcttccgattcttctcgtcggcctcggctggggcaatatggcggcgatctcggccgtcgtcaccgctgccgtgcttggcgcgatcgccatctcgccgtccttcgcggtgatgatgacgctggtcacgctgctgcctgcgggctggatcagccatcttgcgaaccttgcgcgaccggcctccgaactcggcggccccgatcacctgatggcgtggtatccgttgtcggacatcctgctgcatctctgcggactggtgacgctcgccgtcatcgtcgttggcgtgatgatcggctacggccctgaactgatcaaccgtctggtcgacgtgctgttcgcctcggtggcgcagcagcaatccgatttcgcgccggatgcgaccgtgatcgcgcagaccaaggcgctcgtcctcctgcttctcccggccatccagggcggcatgtgggtgatgatgctgtttgccgcctattacctcgcgacccgcatcgtcgcggcatccggtggcggcctgcgtccacgcgaggatatcccctcttcgctgaggatgaaccgcaacacgatcttcatcttccttctcgggcttgccgctacctttctgggcggcatcccggcgatggtcggagcaaccgtcgtcggcacgttcggtgccggcttccttctctccggtttcgccgcgctgcattttcgcacgcgcggcaaggattggcgcctgccggcgctcgttctctgctacctggcatccctcatgttgatgctgccagcccttttcatcctcgttctggggctcagcgatacccgcaaggccatcgcgctcaccccgaacaaggatgctgatgcccccaaacagacagattcaaaactctaggaacacgaaaggaactctaacatggatgtcattcttctcgaacgcatctccaagctcggccagatgggcgaagtggtcaaggtaaaggacggctttgcccgtaactacctgctgccgctcggcaaggctctgcgcgccaacgacgccaacaagaagcgcttcgaatccgagcgcgcgacgctcgaagcccgcaacctcgagcgcaagtcggaagcacagaccgttgccgacgctctcgaaggcaagtccttcatcgtcgttcgttcggctggcgaaaccggccagatgtacggctcggtcgctgctcgcgacgtcgttgaaatcctggccgccgaaggcttcaacatcggccgcaaccaggttcacctgaacaccccgatcaagacgatcggtctgcaccaggtcgaactgcagctgcatgccgaagtcgagatcaagatcgagctcaacgttgcccgttcggccgacgaagccgagcgccaggccaagggcgaaaccctgacgtcggtcgacgccatctacggcgtggacgaagacgctctgcgtccggaagacttcttcgatccggaagccgacggcaacgccgaagacgaataaggttcaggagagcaatctccggaatgcgaaagccgggcctcgcgcccggctttttgctgtccgctgttcagaagactaattggccgccgtcttccgctccggctctgcgctcttgtcgacgctgacgacgaccgacaggcccggccccaagcccttggccgccggctggtcgggatcgatgctgatgcggacgcccacccgctgggcgatcttgacgaaattgccggtggcgttgtcggccttgatgacagcgaattcggagccggccgcaggcgaaaagcgctcgatgcggccggtgagccgctggcggcccaaggcatcgaccacgatcgagacgggctgaccgacctgcatgccctcgagctgcgtctccttgaaattggcgacaacccagacatcttccggcaccacagccatcaattgcgtgcccgccgccacatactggccgaggcgaacgccgatctcgccgagatggccatcgcgcggcgccacgatcgacgtgttctggaggtcgatctcggcgagtttcaccgtcgcctcggcgcttgcgacattggcctccagcagggagcgattgacgatgatggtcgccatattttgcttcgacacttccagcgccgactgcgcctggttcaacgccgccttcgcctcctcgagcgtcgcctgcgcctgctcggattcgctggccgaggcaatgcccctgtcgttgaggttacttatccgatcccaggcgagctgcgcgcgcttcagcgaggcgttggcactatcgatctgcgcctggctggaggcgatggtcgccttcgccgacagttccgactggcgggaattttcgagcgacgccttctggccctcgagcgccgagcgggcctgggcgagcttctgcgtgtagatgcggtcatcgatcttggccagcacatcgccctgcctgacctgctggtagtccttcacgggaacgtcgacgatgtagccgttcacctgcgggctcatgatcgtcacgtagcccctgatataggcgttatcggtcgtttcgaccgacgtgacgaagggcggtaggcgccaggcgtaaagcacgagcaggacgcccgcgataccggcgagaatggcgatgagactggcgggcgaccggaataatttcgacatgcggtgaactcgtgatcaggattgaacggctgtggaggcactcggctcggcgccccggcgcgtggagaggcgcagccatgcctgatggacgagcatgacaaggagaccgagcagagatgcaatgcaaatagcaagaaaggtgtcgttgtaggcaagcgtataggcctcacgcgagacctgctgggacagcaatgcgatgccctcggcgttgagcaatgtctggtcggtgatgaccttgccgtagcccgaggacagctgcgacacgcgctgggcaaccagcggatcctgcaacaggatatgctcgaccagcgcgttggaatgaaatttctcgcggatggtgacgaaggtgccgagcatggccgagccgaagagcgagccgatgctctgggtgaagaggaagatcgccaggaaattgacgatgaagggcatgccacgggccatcgccgccttgaagccgctcgccatcaccggcggcaggaacatcgccgcgcccgcggagaccaaggcttggctgagatacatctgctccggccgcgtcaggctggtcgacaggctgtcgagataggcgcctgccgcgatgagcaccagcgatatgagatgggcggtattgacgtagcgcgtcgtcatcaacagcgcgcagaacaatccacccacgacggaagcgaccagaacgaccgcgtagagcttcgtcgtctgatcgttgaggaggccaagctgctgatagaagctggcagcggtcgacgattgctcggacgagacgaagcggaacatcagcaggacgcccgccatcctgagattgggtcccgacagcacccagcggatatcgagcatcggattttcgcgcggcagctcgatggccaccaccagcgccaggcaagcggccgcgacggcaagcagaacgccgatccacggcgcctcgaaccaccagtagagccgtccgagtgtcaaagcgaccgcgagacaaccgaaaccgacggcaagcaggagatagctcagaatatccatgcgctggatgacgatcgcgcgcggcggcgccgtcagaggcatggtgtagatgacggcgaaggccagcagcgccagccccatctccagcgtgtagagcgcgtggtagccgccgagatcaagcagcggcggcgagatgatgcgcgcgatcggagcggcgaagagcgtgcacatcagcgccatgctgatgcctgtcgtcaacttgcgctccggcggaaacagttccagcatgtagagaaagccgagcgtggagatcggcgcggcggctatgccgctcagcgccctgaccacgatggccgagcgcagatcggtcaccagaaggttcagcaccgcggcaaggacgaagcagatgatgctgaactcggcgaagcgcctcaggccatattgcgtacggatcttgaagagcgcgatcgacaggctggcatagggcgccatataggccgccgacagccaggagacctcggcggccgttgccgaaaacgatccctggagctggtagatattggcattcacgaggttcatgccgaggccctgcgtgacgaacagcagaaccgaggcggccatatagaaaggcttcttccagcccggcatcagcgccacgggcggaggcgcgggctgcggctcctgtcccgtcgtctcgtccgcggctttcggcgcaacagtgtcgctggacgcctggacgaggctcatcgctatttcctcacaccccgcgaatgccctgcaaattcgcctgcatcgcccgtatcgtatccaaggtagtcctcaggtcgcgttcgggaatacctgcgatcacctgggctcgcacgctgacggcgatgtcatcgatctcgccggcgacgaccttgcctgtctcggtgatgtagatttccttggcacggcgatccgaacccgcgacgcggcgctcgacgaagccctgcccttccatcgcgtccagaatgcggaccagcgtcggcgtttccagctccagccggtctgcaagctcgcgctggttgatgccgtccttcttgttcagcgtgaagaacacccgcgcccgtggcagcgtcatgttccgttcccgtacgatcttgtcgaaaaccgctctaagcttccggttgaaagccgccaaatcttcaatcaactctcgtccgagaggcgcatttgtcatatttatcagcccatttaattagtgtgcttattatatttattatgcctacagtcatttttcgcggttttcaagcgcaatgacgagagtctcgatgcacactcccttaccaaagcctaaaataccacgaacgcgttgattcgcgtgagtcgctttgtaccgtgtcctgatggctacaccgccggtattttcgcgcgatggcacgatgcgctgtggagaagtcgaacaacttgccaaagccaaagcgttttggccgtgcgccatgctcagcacttgattttgccgttggtgaattgcaaacccgaagctgaataagacagaacggatcaagatgaacgacgccgcccgaaagatcgccgctgttgcccagccggaacagcactatcgcgaagctcccaacaacatcgaggccgagcaggcacttctcggcgcgatcctgatgaacaacgacgcctattaccgggtgtcggacttcctcaagccgccgcatctttatgagccgctgcaccgcaagatcttcgaggtcgccggcgatatcatccgcatgggcaagatcgccaatccggtgacgatcaagaccttcctgaaggccgacgagaaggtcggcgacatgacggtttcggagtatctcgcgcgtctcgcgcgcgaggccgtgaccatcatcaacgccgaggactacggccgcgcgatctacgatctggcgctgcgccgggcgctgatcaccatcggcgaggacgtcgtcaacatcgcctacgacgcgccgctcgacatgccgccgcaggcgcagatcgaagacaccgagcgccgcctgttcgaacttgccgaaaacggccgctacgacggcggcttccaggcgttcaacgacgccgtggcgctggcgatcgacatggcggctgtcgccaaggagcgcgatggcggcctttccggtatctcgaccggcatcatgtcgctcgacggcaagatgggcggcttgcagcgctccgacttgatcgtgcttgccggacgcccgggcatgggcaagacctcgcttgcgaccaacatcgcctacaacatcgccgccgcctacgaaggcgaagtgcagtccgatggcagcatgaaggcgaaacagggcggcgtcgtcggcttctactcgctcgaaatgtcgtccgaacagctggcgacgcgtatcatctccgagcagaccgaggtctcctcctcgaagatccgccgtggtgacatcaacgacgccgatttcgaaaagctcgttgcctgctcgatgatgatgcagaaggtgccgctctatatcgaccagaccggcggtatctcgatcgcccagctatccgcccgcgcgcgccgcctgaagcgccagcgcggcctcgattgcctcgtggtggactacattcagctgatgacgggcgctggcaagggtgacaaccgcgtgcaggaaatcacccagatcacgacaggcctcaaggcgctcggcaaggaactcaacgtgccgatcatcgcgctgtcgcagctgtcgcgtcaggtcgaaagccgcgaggacaagcgcccgcagctctccgaccttcgtgaatcgggctcgatcgagcaggacgccgacgtcgtgctcttcgtgttccgcgaggagtattacgtcaagaacctggagccgcgcgacatccacgatccgaaatatccggagtgggaagcgctgttcgagaaggtgaagggcaccgccgacgtcatcatcgccaagcagcgccacggaccgaccggcaccgtcaagctcgccttccagtcggagttcacccgcttcgccgacctggccgagccgagcttcacgcattacgaagagcagtaagggcctgagcaagcgcccgactgttcttccacccatcacacttgctccctaaactggccggagattgtatctgccggccaactttcttggtgcgaactatgaccgattttcccgacgactacgaagaagaagaccgttttgcctccgccggtttgcgcctgacggtggatctggccgcgctgaccgacaattggcgtgacatggcgcggcgttccggcaaggcgcgcacggcggccgtggtcaaggccgacgcctacgggacagggatggaggacgctggcgaggcgctctatctggccggcgcgcgggacttcttcgtggcgaccgtcgatgagggcgtgacgctcaggctctacgcgccggacgcccgcatcttcgtgctcgcaggcatctggccgggaaccgagcggcgcttcttcgagaacgacctggtgccggtcatatcgtcggaggagcagctcgccttctggatggcggtgctggccgagtatggcgactacccttgcgcgctgcatgtcgataccggcttcaaccgtctcggcctcgacatgaacgaggcgatcgcgctcgccgacgacgtgtcgcgtccggcgagtttcgcccccgtgcttgtcatgagccacctcgcctgcggcgacgatccgaactcggcgatgaacaggcaacagcttgaatcattcagcaaggttagcgccgcctatgaaggtatcgattcaagcctgtctgcctccgctggcatcttcctcggcagcgactatcacttcgacctgacccgtcccggtatcgctctctatggcggcgaagcggtgaacgggatggccaatccgatgcgttccgtcgtgacggcggaagcgcgcgtcattcaggtgcgcgatgtcagggcgggccaggccgtcggctatggtcgtgcgctggagctcacccgcgacagccggctcgcgatcgtctccgccggctacgccgacggctatctgcgcagccagtccagcggcggcgtacctttgcgccaggtggcgccgcagggcggccacggcttcatcgccggccgcagggtgccgatcgccgggcgggtgaccatggacctgacgatcttcgacattaccgacctgcccgagaacgcggtgagcgcaggcgattatgtcgagctcttcgggaagaacatctcggtcgacgacgtcgcgcgcgcggcgggtacgatcggctacgaggtgctgacgagcatggggttgcgccatgagcggcggtatctgagcgaggacgatggctaggggcttggaaagcgatattctcctgtgctatacgagaacaaaaggagatcgaaatgaccgagatccatctcagcgagcaagacctcaccttcatcgaggagcagatagcagacggacgataccgaaacgccgaagaagttattgcggctgggttgagactgcttggcagcgaagaaggcgagatacaggaactgcgccatctgatccaacagggcatcgatgacatcgatgccggacgcgccatcacgttcgaaagcgccgaagatctgacaaagcacattctcatgatggcggaggaacgaaagaatgcgaccgcgtcagctgaaaatgtcgttcgaggcgctggacgatcttctcggcatgtatgatcacattgcagccttcgatgcgcttgctgcgcgccattttctcgatgacatcaacagcaagatcgaatggatagcaaagctcggcatagccggaagtccgcgcgagttcattcccgggttgcgggctttcccttatcgtaatcgctgtatctatttcttcattgatgatgagacgctttccgtcctgcgcgtgctgcatggacggcaggagatcgagctctcacatttcctgcgtttttatcagacagaacaagaagactgatccttcctcatggcaaaagcaagaacacaattcatctgccagggctgcggcaccatccatagccgctgggccggcaaatgcgagggttgcggcgcgtggaacaccatcgtcgaggaagacccgatgggcggaatcggaggtgggccggcaaagacgccgaagaaaggccgcccagtggcactgaccgcgctgtcgggcgagatcgaggaagccccgcgcatccacaccggcatatccgagctcgaccgggcgctgggcggcggcttcgtgcgcgggtcggcggtgctgatcggcggcgatccgggtatcggcaagtcgaccctcctcatgcagggagcagcggccctttcgcggcgcgggcaccggatcatctatgtctcgggcgaagaggcggtcgcgcaggtgcggcttagggcgcagcgccttggagcagcggatacggatgtgctgctggcggccgagaccaatgtcgaggacatcctggcgacgctcgcggaaggcaaacggcccgatctcgtcatcatcgattccattcagacactgtggagcgatcttgccgaatccgcgcctggcaccgtgacgcaggtgcgcaccggcgtacaggcgatgatcaaattcgccaagcagacgggtgccgccatggtgctcgtcggccatgtgaccaaggacgggcagatcgccggtccgcgcgtggtcgagcatatggtcgatgccgttctctatttcgaaggcgaccgaggtcatcattaccgcatcctgcgcacggtcaagaaccgcttcgggccgacggacgagatcggcgtgttcgagatgtcggacaagggcttgcgcgaggtggcgaacccgtccgagctcttcctcggcgagcgcaacgagaaatcgccgggggctgccgtcttcgccggcatcgagggaacgcggccgatcctcgtcgaggtgcaggcgctggtggcgccgacctcgctcggcacgccgcgacgggcgatcgtcggatgggattcggcgcgtctgtcgatgatcctggcggtgctcgaggcccattgcggcgtcaagctcgggcagcacgacgtctacctcaacatcgccggcggctaccggatttccgagccggcggcggatgtggctgtcgcatcggcgctggtttcgtcgcttgccggtattgcccttcccgccgattgtgtctatttcggcgaagtcagcctgtcgggcgccgtccggccggttgcgcacacgaaccagcgcctcaaagaagccgagaagctcggattttctgcggcactgcttccatcggggtccgccgaactgccaaagggcacgggcgggcgctggagcgagatcgaaagcctgccggatctggtcgcccggatcgccggctccaaaggcgctttgagacgtgtggaagaagaggtttgatcctttcatcgccatgtcaggtgatgatataggatgcacgcaatgaggcgcgactgagctgcgaataggcggccgtcctggagtggaatttatatgcccattacgattttcgacggtattgtcatcggcgtcgtgcttttttccgccgtgctcgccatggtgcgcggcttctcccgcgaagttctttccatcgccagctggggcggctcggccgccgcagcctactatttttatccctacctcgttccctacgccaagaagtataccgacgatgaccgcatcgcgctcgtcggctcggccgcggtcgtgttcctgatcgcgctgatcatcatctcgttcatcaccatgaagatcgccgacttcatcatcgacagccgcatcggtgcgctcgaccgcactttgggcttcctgtttggcgcggcaagaggcatacttctgctcgtcgtcgccaccgctttctggaactggctcgtcgatcaggaccaccgcccagcctgggtgaatgatgccaagtccaagccgttcctggattcgatggtggtgaagctgcagtcggttctgcctgctgaactcgcccaggtcgtgcgtgcaagcgtgatggagaaaatacagccgcagggcagcaatacggaaagcgacaatgcgcccgcttccgatcaagccccggccgaggatgccgcgcctgcccctgccaatggtgcacagcagccgtctaattgacgcagtgttcaacagcttgacccagcctgtggcagttgccatttgacggggacgcgaataaaggtccggccgggcacacgctccgccgggcttatgccgttttcggaagtgccataccattcttgtgagagcaaaggcccgcagcaatgaaccagtcccattcctccacgctcaacgacgaactcgatggcgatacgctgcatgaggaatgcggtgtgttcggcgttctcggccatcccgacggcgcaacgctgacggcgctcggactgcatgccctgcagcatcgtggacaggaagcggccggtatcgtcaccttcgacggcaagcagttccatatggaaaagcgcatgggcctcgtcggcgaccactacaccgatccggcgacgctggcgaagctcccaggcttcatctcgatcggccatacccgctattcgaccacgggcgaagtggcgctgcgcaacgtgcagccgctgtttgccgaactcgaggtcggcggcatcgccgttgcccataacggcaacttcacgaacggcctgacgatgcggcgcatgctgatcgccgatggcgccatcttccaggcgacgtcggacaccgaagtggtgctgcatctgatcgcccgctccaagcaggccacctcctccgaccgcttcatcgacgctatccgccagatggaaggcggctactcgatgctggcgatgacccgcaccaagctgatcgcggcgcgtgacccgatcggcatccgccctctcgtcatgggcgaactcgacggcaagccgattttctgttccgagacctgcgcgctcgacatcatcggcgcgaaatacatccgcgacgtcgagaacggcgaggtcatcatctgtgagatccagtccgacggctcgatcaccatcgacagccgcaaggccgaccagccgaagcccgagcgcctctgcctgttcgaatatgtctatttcgcccgtcccgattccgtcgtcggcggccgcagcgtctacacggcgcgcaagaacatgggcatcaacctcgccaaggaagcgcccgtcgacgccgacgtcgtcgtgccggtgccggatggcggcaccccggcagcccttggctttgcccaggcaagcggcattcccttcgaatacggcatcatccgcaaccactatgtcggccgcaccttcatcgagccgacgcagcagatccgcgccttcggcgtgaagctgaagcattcggccaaccgcgcgatgatcgaaggcaagcgcgtcgtcctcgtcgacgattcgatcgttcgcggcacgacctcgctgaagatcgtgcagatgatccgcgatgccggcgccagggaagtgcatatccgtgtcgccagcccgatgatctacttcccggatttctacggcatcgatacgcccgatgccgacaagctgctcgccaaccagtattcgagcctgcaggcaatgtgcgactatatcggcgccgactcgctcgaattcctgtcgatcgacggcctctaccgcgccgtcggcggcgagagccgggatgccgccaacccgcagttcaccgaccactacttcaccggtgactacccgacccgcctgctcgacaacgacagcacgagcaatgtccgcaagctcgccgtgatggccagcaacggctgatctcgaccgacctttcgatcgaggggtggtcagcgcccctcgcctccccgcgcatacggataaggctacaatgagcgtcaatctctccggcaaggtcgcactcgtcaccggcgcatcgcgcgggatcggctattttaccgcgctggagctcgccaaggccggcgcgcatgtcgtcgcctgcgctcgtacggtgggtggcctcgaggatctcgatgacgcgatcagggccgtcggcggttcggcgacgctcgttcctttcgacctcgccgacatgaacgccatcgacgcgctcggcgcctcgatcttcgaacgctggggcaagctcgacattctcgtcgccaatgccggcgtgctcggcgtgatctcgccgatcggtcatatcgaggcaaaggtgttcgagaaggtgatgaccatcaacgtcacggcgacgtggcggctgatccgctcggtcgatccgctgctgacgcgttccgaagccggtcgcgccgttatcctgtcttcggctgccgcccatcgctgccgtccgttctggggcgcctattcggcctcgaaggccgccgtcgaggctctggcgcgcacctgggccggcgaaacgcagagcacggcgctacgcatcaccagcgtcgatccgggcgccacgcgcaccgcgatgcgcgcgcaggcggtgccgggcgaagatccggaaacgctgccgcatccttccgaggttgccaaggcgatgatgccgcttctggctcccgactacaccgaaacaggcaagctgttcatcgtgcgcgagaacaagctcgtcggctaccagatgccgggctgaccggccttccttccagacgcggccccgaacgacgcaccgaggacggtctcgttcggggagagagttctttcgaccatccggcccttcgcttgcgctccgggcgttcgacgctgcaatcgattcgctggatcgattgccctggctcagcccgaccgcgtctccccccttgaccaacgcccgaagccgcgccataaaacccgccatgaagacggttacctgcattatctgccggaagattattcgctagcgcgctcgctggcctggccgttttcgtctcccaacacgccaagatgacaaacgccccggcccgccggcggcgatacgtttttcggattatggcattttgggagaataaacatggacggccagtcgggatcgaagacgccggaactcaagctctacaacacgctgacgcgcgagcggacggttttcgcaccgatcgatcgcgacaacgtgcgcatgtatgtctgcggcccgaccgtctatgacttcgcccatatcggcaacgcccgccctgtcatcgtcttcgacattctgtttcggctgctgaagcacgtctatggcgacgatcacgtcacctatgcgcgcaacatcaccgacgtcgacgacaagatcaatgcgcgggcgctgcgcgatcatccgagcctctcgctgaacgacgcgatccatgcggtgaccgagaagacggcacggcagttccacgaggacgtcgccgcactcggctgcctggagccatcggtggagccccgcgcgacggacaatatcgcgcagatgatcgagatcatcggtcggctgattgcgcgtggccacgcctatgaggccgagggcgaggtgttgttcgacaccaagtcgatggccgattacggccagctttccaagcgcccgctcgacgagcagcaggccggcgcccgcatcgcggtcgacgcgcacaagaagaaccccggcgacttcgttctctggaaggcctccagcgacagcgagcccggctgggaaagcccctggggccgcgggcgtccgggctggcatatcgagtgctcggcgatgagccagcgctatctcggcgacgtcttcgatatccatggcggcgggctcgacctgatcttcccgcaccatgaaaacgagatcgcccagtcgcgctgcgcgcacggcaccgaggtgatggcgaacgtgtggatgcacaacggcttcgtgcaggtcgaaggccgcaagatgtcgaagtcggaaggcaacttcatcaccatcaacgagttgctggcgaccgagaaattcggtggtcgcaagtggccgggcgcggtgctgcgccttgccatgctgatgacgcattaccgcgagccgatcgatttttcggtcaagcgcctggaagaggcagaacgcctgctggcgaagtggccggcggccgacgccggcgacgccgcgccgtctgatgcggtcctcggcgcgctccgcgacgatctcaacacggtggctgccgtgcaggcgctgcatgcgctggcccaggacgccaacgccgacaaatcgctgttgccgacctacgccgcgagtgccgccctgctcggtcttctgcccgagatggcggagatcgacgaggctgtggcgatcgagatcgaccggcgcgtgaaggcacggctggaactgctgaaggccaagaacttcgccgaggccgacaagatccgcgacacgctgctggccgagggcgtgcagctgaaggacggcaaggatgcagcgaccggcgagcgggtgacgacgtgggagttgaagcggtgacagcggaagtctcggcgtcggagcttgtggcgaatgcccctccccaacccctccccacaagggggaggggctatagtgccgcgaccacccgcttcaccttggtcacagtgcatgcggtttctcgaagtgaggcatcgccacgggttagccctcccccttgtggggagggttgggaggggtctatgcatccagcgcaacggaggattgccgaatgacgacctacaccggcggctgccagtgcggcgcgatccgtttccgggtccgggggacgctcacggactcctcgatctgccattgccgcatgtgccagaaggccttcggcgcctattacgcgccgctggtatcggtgcgtggcgccgagcttgaatggacgcggggtgagcggaagcggttccggtcgtccaacgtcgtcgagcgcggcttctgcgccgattgcggcacgccgctcacctatgaggcgccggatgggatcgcgattgccgccggtgccttcgacgatccctcggcgctgccgccggtgatccagttcggcaccgagcgcaagatcgacttcgtcgaccacctgcacgaactgccggcccgcgtcaccgaggacgatgccgaggcagcacccttcgtgctcgatctcgtctccaaccaacaccccgaccacgacacggccgaatggccatctggagcatcatcatgagcgaacccatccggacaggcggatgccaatgcggcgccgtgcgttttcgtatctcggccaagctcgggcgaccgtcgatctgccattgccgcatgtgccagaagcagttcggcgggttcttctcggcgttggtgacggcacccgaggagggtctagagtggacgcgcggcgcgccgagctatttccagtcgtccgtcaacatcgagcgcggcttctgtaaggattgcggcacgccgatgatctacaggcatcccggcgggctcgagcttgcgatcgggaccttcgacgaccgcagcgatctcgcgccacagatccaggtgaactacgaggcgcgcgtcccctgggtcgagacgatcttcgaccagccggttcataccgaccccgatttttatgcacggcaggaggcgatcatctccttccagcatcccgatcacgataccaatatctggccagcccaaggcgtgaaaatatgaccgaagttctccgaacgctctatcccgaaatcgaaccctatgcgtcgggccatctcgatgtcggcgacgggcacatgatctactgggaacgctcgggcacgccgggcgcgaagccagccgtctttctgcatggcggccccggcggcgggatttcgccgagccatcggcggctgttcgatcccgcgctctacgacgtgacgctgttcgaccagcgcggctgcggccgctcgacgccgcatgccgatctcaatgccaacaccacctggcacctggtctccgacatcgagcgactgcgcgagatggccggcgccgacaaatggcaggtcttcggcggttcctggggatcgacgctggcgctcgcctatgccgagaaatatcccgagcgcgtatccgaactgatcgtgcgcgggatctatacgctgacgaaggccgagctcgactggtactatcagttcggcgtctccgagatgtttccggacaagtgggagcgcttcatcgcgccgatccctgagaacgagcggcatgagatgatgcacgcctatcaccgccggttgacccatgaggacaaggcggtgcggctggacgcggccaaggcctggagcatctgggaaggcgagacgatcacgctgatgcctgagccttcgaccagcgacaagttcgaggaggccgagttcgcctatgccttcgcgcgtatcgagaaccacttcttcgtcaatgccggctggatggaggaaggtcagttgctgcgcgacgcgcacaagctgagggacattcccggtctcatcgtgcacggtcgctacgacatgccctgcccggccaaatatgcctgggcgctgcacaaggcctggccgaaggcggatttccacctgatcgagggtgcgggacatgcctattcggagcctgggatcctcgacaggctgatccgggcgacggatatgttcgcggggaagagctgagggaactgcgggtgaggaactgcgggaactgtgcctgtggccccctcatccgcctgccggcaccttctccccagtggggagaagagactcgttgcggcctctcgctcgtccagcgacgtatgctgttggagcggtgccggtgcgtcacatcccttctcccccacggggagaaggtggcggcagccggatgagggggcttccgcacaacgctaaattttacaacacacccggccaccgggaggaaccgacatgaaagaccgcatctatctcttcgacaccacgctgcgcgacgggcagcagacgccgggcatcgatttttccgtcgaggacaagatcgccatcgccaccatgctcgacgaattcgggctggattacatcgagggcggctatccgggtgcgaatccgacggatacggctttcttcaacgagaagcgcacccgcaacgcctctttcgtcgcttttggcatgaccaagcgcgccggcgtttcggcttccaacgatccggggctcaccggcctgctgcaggcgaagagcgacgcggtctgtctggtcgccaagagctgggactatcacgtcaaggtcgcactcggctgctccaacgaggagaacctcgaaagcatctccgagagcgtcaaggccgtggtcgccgccggcaaggaggcgatggtcgattgcgagcatttcttcgacggctacaaggccaatcctgagtatgcgctcgcctgcgccagggcggcccatgatgccggcgcgcgatgggtcgtgctctgcgacaccaatggcggcacgcagccgcccgaagtccgcgacatcgtcggggcggtgatcgccgcaagcgttcccgggcactgtcttggcatccatgcccacaacgacaccggccaggcggtcgccaattcgctcgccgccgtggaggccggcgtgcggcagatccagggcacgctcaacggcatcggcgagcgctgcggcaacgccaatctggtgacgctgatcccgacgctggcgttgaaggaaacctattcctcgcgcttcgtcactgccatcgacccggaacgtcttctcaatctgacgcggctgtcgcatgcgttcgacgagctgttgaaccgctcgcccgatcaccagctgccctatgtcggcgcatccgccttcgcgaccaaggccggcatccatgcctcggcgctgctcaaggacccgcgcacctacgagcatgtgacgccggagagcgtcggcaatttccgcaaggtgatggtgtcggaccagggcggcaaggcgaatttcatcaacgcgctgaagcggcgcggcatcgaggttggcaaggacgatccgaagctcgaccggctgatctcgctagtcaaggaacgcgaagcctcgggctatgcctatgaaggtgccgatgccagcttcgagcttttggcgcggcgcacactcggcacgatccccgaattcttctcggtcgagggattccgggtgatggtggagcgtcggttcgattcacacgggaaggtgaagattgtttccgaggcggtcgtgaagctcggcgtcgatggccagaccatcatgtcggtggcggaaggcgatggtccggtcaacgcactcgacctcgcgctgcgcaaggatttcggcaaataccagcacgagatcgacgatctggtcctggccgacttcaaggtgcgtatcctcaacggcggcacggaagcgatcacccgcgtgctcatcgaatccaccgacagcgacggcgtgcgctggtggacggtcggcgtgtcggaaaacattatcgatgcctcgttccaggcactgatggattcggtcatctacaagctgatgaaaaaccggcagctggcgggaaagatcgcggcggaataggaccgctcaatgcaggttggccatgacgaggccccagcgttcctgcgagtaccattcctgctcggtcttgaccgcattccagcgcagcgcgtgaatgcggttgagccctcctgcgtggaaggcacgatcgagcgcggcataggtggacagatcgcccgagatcccctcgccccagacgaaattgaccggctgcagaaagcgcgcgctcaattcctccccttccctgccgatgacgaagaaggcggcctgcgaggtgacgccgagcagccgaccttcgccgccaatcgcgggtgtgccgagcggaaacagcagccgtccgccggacgcaagcttgtcgatccagggttcggccggatgatgcagagcgaaattcacgtagacgacatccgcagcctcacggggccattcgaggccgtttccattgacgacctcgacgttttcgtatcgctcgagattgcgcctggcctgctgcgccagttccgcgtcgaactcgacggccacgacgcggccggtctttccgacgatttccgcgatgatcgcggtatagtagccgctgccggcgccgatgtggcagacggtctcgcccttgcgcaacttcaaccggtgcaaggcgcccgcatgcaggctcgggctgccattgttcacctggcgatcggcctgcagcgcgaagagcagatcctgatagaggacgaccggatcgtctgacggcacctccatgtagcgcttccagtcgcgcatcttccacggcggcggccccagaaagttctcgcgcggcacaatggagaaagcactcagcagcgcctcattgcggtcgacgccggctctggccagcatttgcgcggcgtatgcgcggcggcagattttcagctcggcgtcatccacgatcgcatccttgtccttcagccgtatcgaatatcgcttcaacgaaatgaattggcctattcatggccattgcgctaatcgggtgccaatcacaaaaccaatggaaacaccccatgtccgcagatgcaagcattccgctcgtcaaaaacgaggacagtccgcgtggcttcgccttcgcgcttaccgcctatctgctctggggcttcctgccgatctacatgaaggcggtcgcgcatatttcgccggccgaggtgatcgcgcatcgcatcgtctggtcgctgccgcttgccggcatcgtgcttatcgtcctcggccgcacgcaggacatccgcatcgcgctgcgctcaccgcgcatgctggcgatggcggcgctgacggcggcgctgatcaccgtcaactggggaacctatgtctgggccatcggcgccggctattcgctcgatgcggcgctgggctatttcatcaatccgctcttcagcatcttcctcggcgctgtcgtcctcaaggaaaagctgcgcccggcgcagatcggcgcgatcgcgctggcgggcatcgccgtcgtggtactcgcggtcgatggcggcggcattccgtggatttcgctgacgctgacgattacctggggcctctacgcgctctttcgcaagaccttgccgctcggaccgaaccaggggttcttcctggaggtactgatcctcagcatcccggccttcttctacattctctatctggaactgggcaccggcaccggccatttctatcgcaccggctggaccgataccgcgctgctgctcggctgcggcctgatcaccgccgtcccgctgatgatctatgccaacggcgccaagctcctgaagctgtcgaccatcggcatcatgcagtatatcgcgccgacgatgatcttcctgatagcggtcttcctgttcaaggagccgctcggcaccgcgcggatgatcgccttcccgctcatctgggcagggctttgcctctacacctggtcgatgctcagaggcagccgggggcgataagccccctaacactgacgttacatcttcgaaataacggcttcctcgccgtcgcgatcgctcgcgacttccgccgcctgcgccatgatcgcgggaatgatctcttcgatactgtcgatgacgagcggctgcaccctgtgggcggtgtggatgaagccctcgtcggtcatgtggcgcaaaagttccatcatcgggtcccagaagccgttgatattggcgaagatcatcggcttttcgtgacggccgagctgcgcccaggtcatgatctcgatgatttcctccagcgtgccgatgccgccgggaagcgcgacgaaggcatccgagcgctcgaacatggtgtgtttgcgcgcatgcatgtccggcgttacaatcaactcgttgagctggccgagcgagtggcgggtcgcctccatgtcgatcaggaattcgggaatgataccggtcacctgaccgccattcgagagcgcaccgttcgcaaccgcccccatgatgcccttggtgccgccgccgtagatcaggcgcaggccgtaatcggcgatttccttgcccagcgcgcggccggcggccatgtggctcgggtcgctaccggggcgcgaaccacagtagacacagatggagcgaatggaatgagattgatctgtcatgggagcaaacaactattctctctgggtccagtcaagaaaaatgacggaaaacgtacatcttacatttgcccggctactttgactgcttgtgcaaagcaacgggaatcgctagcaatttcaggaagtctggcaagattgccgcttggggagccctgatgatgaaaaaccgcgccggcttgctggcccttgcagtgcttgtaatcgcaattctgttgatggtctttgtcatcatgccccgtatcggtggcgatgccgccaaggtcggtgacgcaatcaatcaggcaagctccgaggtcaagaaaaccgtaaccgaatccgccaagacgtcgcgtccgtcggcgcccgacgatgccgcgaccgcgcagaagctcggcggcctgacgacggcggccggacaggcacttggcgaacttaaggcgctgtttgccgacggcaagggcccggccgacgatgtttacgcggccgccaagacgaagacgatcgcagcgcttcaggcgctcgtcgatttcgccgcacccgagggcaccaacccgatcaccacggccgcgatcgacaaggccaaggccggcgccgccaaggcgctgtccatcatccaggcgctgcccgagacgatcgccgacgcggccgccgccatcgcccgcgccgaagccgcgctcacgggcgcgccggagcccgcggcccccgccgcaaaccagaccgaggacaatgcggccgcgacggtgccggccggcccgaaactgccgaccttcgacgtgctgcgcgtcgagcctgatggctccaccgtcatcgccggttcggcggaaccaaacagcaagctcgaaatcctcgaccgcgacacggtgctgatgggaaccgatgtcggcgacaacggcgatttcgtcgccgttctggaaaatccgctgtccagcggcgaccaccagctgcaactgcgcgcgacggccaaggacggcaaggtgacgacctccgaagagatcgccaccatctcgatcccgaaggacggcaatgcatcgcagctgctcgccatggtctcaaagccaggcgccgccagccgcatcatcaccgctcccggtgtgacgccaccgacagccgcgagcggcgccaccgcgaccgaccaggcctcggcagcgccgcaggtacaggctcccgcgacatcagacacggcggccgagccgacgacagcggcggccgccgccgacgtccgggtcaatgccgtcgagatcgagggcgacaagatcttcgtcgccggcaccgcgaagcctcagtccaacgtgttcggctatgccgacgacaagctgatcggcaaggccaaggccggcccggacggccacttcgtcatcgatggcgtgatgccgcttgccgttggcgaccacaagatccgggtcgacgtcgtcgatgccgccggcaaggttctggttcgcgcttccgtgaacttcaaccgccccgaaggcaaccaggtcacggtggccgcccagtccggcacgcccgccggcaatgcgaccgcgccgatgctgtctattgacgagagtgcgctcggcaagctgaagaacgatgccgccaaggcgttcacgctgctcagcggcctgttcggcgatggcaaggtgcccggcaccgaacagctcgcggccgcccgttccgccaacgagttcgcgctgaaggcgatcgtcgatttccgtgcggccgccgatgcgaccgccgatttcaaggagcgggtgaccacttcctcgatgaaggccagcgatgcgctgaagctgctgcagtcgctgccgcgcgacgccaattcggtcggcgcggcgcttgcaaggctcggtcagatggtggccgatctgacggcgccgccgccggcagcacccacggcaccggccgcccccgcggcaaacgaagtcgccagcggcaacgccggtccggcgaccatcgagcaggcaccgctgcaggagagcaaggaaaccgtgatcatccgccgcggcgatacgctgtggcagatctcgcgccgcatctatggagcgggcgtgcgctacacgacgatctacgtcgccaacgaggacaagatcgtcaacccggaccgcatcctgccgggccagatcttcggccttccgaaggacgcgctgcccaacgccgaggagatgcatcgcaagcgtctatcgggcgaacacctctaggccgacaagaatactgaagattaccggggccggcatcgatatgatcgccggcctctcttttcctttgatcctcttgtgttgtattgctccgcccggaaccctatctggctttgacggcgatcatgtcaggcggcggcctcgcgctgcgccccttcccctctttgccggcaacgcgacacttccagagcctccagcgggccggagacatgcatggcaaacggcaagacagtttcagactccaacctgttacagaccctcctcaatctctggccgtacatgtggccgaccggccgcgccgatctgaagatgcgggtcgtctgggcatcggtctatctgctcgtgtcgaagttcgtgctgctgctcgtgccctatttcttcaagtggtcgacggatgcgctgaacggcaagtctgatctcgcgggcaaggtgccggatctgctcgtcggtgcgatcgcgctcgtcatcgcctacaacctcacccgactgatccagctcggcctgaaccagctgcgcgacgcgctgtttgccagcgtcggccagtacgcggtgcgccaactcgcctacaagaccttcgtgcatatgcatgagctgtcgctgcgctttcatctggagcgcaagacgggcggcctgtcgcggatcatcgagcgcggcaccaagggcatcgagacgatcgtgcgcttcacgatcctgaattcggtaccgacgctgatcgagttcgtgctcaccgccatcatcttctggtggggctacggcttctcctatctcgccgtcaccgccttcaccgtgtgggcctatatctggttcaccatccgcgccagcgactggcgcatctccatccgcaagacaatgaacgacagcgatacggacgccaacaccaaggcgatcgattcgcttctaaacttcgagaccgtcaaatatttcggcaacgaggacatggaagccaagcgcttcgatacctcgatggagcgttacgagaaggcggcgaccagcgtctggacgtcgctcggctggctgaacttcggccagggcgtgatcttcggcctcggcacgaccgtgatgctcatcctctcggcgttggcagtgcagcgcggcgagcagaccgtcggcgacttcgtcttcgtcaacgccatgctgctgcagctctcggtaccgctcaacttcatcggcttcgtctaccgcgaaatccgccagggcctgaccgatatcgagcagatgttcgacctgctcgaagtacaggccgaggtgaaggatgcagccgatgccaagccgctgaacatccagcagggcgcgatctcgttcaaggacgtacatttcgcctacgaccctgcccgcccgatcctgaaggggatttcgttcgacgtgccggccgggaagacggtggcgatcgtcgggccgtcaggagccggcaagtcgaccatgtcgcggctgctctatcgcttctacgacatccagagcgggtccatcaccgtcgacggccaggacgtgcgcggggtcacgcagaagagcctgcgcaccgcgatcggcatggtgccgcaggacaccgtgctgttcaacgacacggttgcctacaacatccgctacggccggccgtcggcaaccgaggttgaagtgaagaccgcagccgaaatcgcgcagatcgcccacttcatcgaccttctgcctgaaggattcgacaccatggtcggcgagcgcggattgaagctttcgggcggcgagaagcagcgcgtggccattgcccgcacgatcctcaaggccccgccgatcctcatactcgacgaggcgacgtcggcgctcgacaccaccacggaacgcgagatccagaccgcgctcgacgtcgtctcgaagaaccgcacgacgcttgtcatcgcccaccgtctttcgacggtgatcagcgccgacgagatcatcgtgctcaagagcggagagatcgccgagcgcggcacgcatgccgaactcttgctgaagaacgggctctacgcgtctatgtggagccgccagcgcgaagcgacccaagccgaggaacatctgaagcaggtgcgcgagaacgacgatctcggcgtggtcaaccggctggcgccggccacttgagactttcggtcgttcgggccgttgcaggcccgcgcgccgcatagatgtgcatgaaagggcatcggcattgcccccaggagtgtttccctgtaaccagcggagacgaaaacgctaggagagcggcatacatgagcttgttcaatacggtacgcaacacgatcgttccggtgcacaaggaaggttatcccttcatcgcggccttcttcgtggcctccctcgttctcggctggatcttcaagccgctgttctggatcggcctgatcctgaccgtgtggtgcgcctatttcttccgtgatccggagcgcatgacgccgcaggacgacgatctggtgatctcgcccgccgacggcaaggtgtcgtccgtgcagatggtcgtgccgccggctgaactgaacctcggctcggcgccgatgctgcgcatctccgtcttcatgaacgtcttcaactgccatgtgaaccgcgcgcccatgcgcggccgcatcgtcagcatcaactaccgctccggcagcttcgtcaacgccgagctcgacaaggccagcgaagacaacgagcgcaacggcctcgtcatcgagaccgcgcatggccagatcggcgtcgtgcagatcgccggcctcgtggcgcgccgcattctctgctgggccaatgccaacgagccgctggatgccggcgaacgcttcggcctgatccgcttcggctcgcgcctcgacgtgttcctgcccgagggcgcgcagccgcgcgtgacgctcggccagacggccgtcgcgggtgaaacggtgctggccgaattcggctccgccaagggccctgtcatcagccgccgcgcctgaaaacactaggatcgcgatcatggaaacgcccttcccgcctttcgaacccaacggtccgcccgataattcggggcgcgggccacggcttcgcgagattccattgcggctggtcgttcccaacctgatcactatccttgccatctgcgccggcctgacgggcattcggctggctttcgagaaccgctacgagctcgccgtcggcatggtgctggtcgccgccttcctcgacggcatcgacggacgcgtcgcgcggctgatgaaggcgacgtcgaagttcggcgcgcagatggattcgcttgccgacatcgtgaatttcggtgtcgcgccggcgctggtcgtctatgtcttcgcgctggatcaggcgcgttcgctcggctggatcgcggctctcatctatgcgatcgcggccgggctgcggctggctcgcttcaacgtcatgtcggagcgcgagaacaaggcgacctggcagtcggaatacttcgtcggcgtgccggcgccggccggcgccatgctggtgctcctgcccgtctatctcggcttccttggaatcagcaccgacaagactttcggatatgtttccgccggctacacggtgctcatcgccttcctgctcatcagccgcctgccggtctggtccggcaaatcggagggcaccaagctcagacgcgatctggtgctgccgctgatgctcggcgtggtgctttatgtcgccatgctctcgagcttcacctgggaagtcatgtcgctgaccgccgtgatctacctattgacgctgccgttcggcgcccgcaaatggaagcgcaaatacggtacgctgacgatcgaagagcccggtgtcggcgaagacgatatcggccgtcatatctgagcctttccagactatcctgacctgacctgcttgacttagagtcgttgttttatcgcatgtcggcagcgccaaaccgctgcacacttttgcgtgacatgcctcaagcctcgcgaattatggtttgtcgacacaaatcatgatgtgtcttgcctccattttgtcgttattttaggcaaaaaagcaataattataagagtctagggacaaaagttaaggagagtaacgtgaccccgaagaagacaagcgtggaacagccggcaaagacagacctcagcgcgcactaccgtccgctcggcctgaaggccgttctcgcggccgccctgatgctgaagaagccagcgctcaccaagaagctcgcctgatcaggacgtcaggaaacgggcgccgaggctgattgccagaagcgccatgacgatgccgatgagcacgtcgagaacccgccatgcggcgggtttggcaaagaccggttgcagcaagcgcgcaccgtagcccagaccaaaaaaccagacaaacgatgccgtgacggcgcccaggccgtaggccagccggtccgcgccctgataggcggccgacaggctgccgagcagcaccaccgtatcgagatagacatgcggattgaggaaggtgaaggccaggcacgtggctaccgccgccttgagacccagcggctcgggcgttcccgtgcgcatcgcaccgggatgaagggcgcgccggaacgccatgacagaataggcgccgagaaacagcatgccgccgagactgacggccgcgatcagggcgggcgagcgtgaaacgagcgtgccgaggccggcgacgccggctgcaatcagcacggcgtccgacagggcgcagatcaggcacagaatgaagacatgcgagcgcatcagcccctggcgcagaatgaaggcattctgggcgccgatggcaatgatgagggaggcgccgaggaagaagccggagagcgcggccgaaatggagaacatgtgaatttccggatgtgactacagtgggattacaggatcagaagaagctgagctggccgttatcaggctttttcttgtcagcgggcggcatcggcttttccaccggcaccggggtttgcagatccgcacccatgttggcgaccttgttgaccttgtcggacaccggtatcgcctcgaagaaatcctcctcgaccggccgcatgagatcggccacctcgcgcggttcctgcgtcttgcaatccagccagcgggcgaaatcctccggcttgatgacgactggcatgcggtcgtggatcggggcgatcgcggcattggctgcggtcgtcaggatcgcgccggtatctacttccgagccgtcggccgaagaccatgtttccagcagcccggcgaaggcgaccacgccgccgtgacgcggcctgatccaataggcctgcgatttctcgccgctctgcttcgacggacgatgccattcgtagaagccggaggctggaacgagcacgcggcgatggcgcatcgcggcgcggaacgacgccttgccgatcgccgtttccgagcgggcgttgatgagaagcggaaacgtcttggggtccttcacccaaccgggcgtgaagccccagcgaacgagaagcgcgcggcgatccggcagattgcttcccctctcctgtccatcgccggcgacaaccaccagaatcggctgggtcggagcgatgttgaagcgcgcgggaaaatcctcgaggtcgaggacacccatgatttccttcagctcctcgggggatatggtcagggcgtagcgtccacacatgacaatctatttgcaccccgcccattcagcggtcaagggactggccaagggggagcagcggctgcgcccgtcggctcagcctctgggcgcgaagaggatgatcgcggagccaacgaggcagacaagggcaccgccgatgtcccagcgatccggcacgcggctttcgacgagccacagccagatcagcgaagcgacgatgtagatgccgccataggccgcgaagatccggcccgccgcgtcgctcggaaccagcgtcaagagccaggcgaagagcgccagcgacaccatgccgggggccagccaccagatcggctttgccaggcgcagccacgcccagaaagcgaagcaaccggcaatctcgaagagggccgcggcggcgtagatgatataagtcacggcagctgccttcgaatcgctgggatcacactttcttcgcggttcagataggcatgcgacggcgatcaccggcaagcaacaaacggcctttctgatgacttcttctccgactgctgcatcttccgcgattctcgagcgcgacggacgtttcctgctggtgctcaggcgcaatccgccatcggcggacatgtacgcctttcccggcggcagggcggagcccggggaaacgcccgatcagaccgcgttgcgcgaattcgaggaggagacgggcatccaagcccgcaatcccgagatcttcgccacctacgacctgaaacagcacggcgccgacgggcgcctcaccagccacttccatctctccgtttttcgggtcgaggccgacgccgatgccgtcgcggtggcggccgacgacgcggtcgccctcggctggttcaccgtggacgagattcgccggctgccgacaccccagagcgtgctcgaatgcgccgaacggctggcggtcgccagggaataaggaagggcaataagcaaggggaaaggcgaccccacaccttgtcgccgccaccttctgggtgtccaatactcacatgattcccattcgccgcgtcttgttgtgttttgttcttggcgtcctgacggcggcgccgacattcgtctcggcacaggggccggtgacggctgtacccgacgagccggttgcgccaaaagacgtcaccgttccctacgacgaccggcttggccggttggccgaggtgctgggatcggtgcattatctcagaacgctctgcaaggcgcggaacggcgaggaatggcgggcgcgaatgcagcaactgcttgattctgaaacgaaagacgagccgggcagaaaagagaaactgacagcggcgttcaatcgcggataccgcgccttcgcctccgtttataccgattgcacaccagcggcgatcgtggcagaagaacgctaccgtaacgaaggcgcaacacttgccaccgaaattacgtcacgctttggaaattaacgataaattaacctcttttcactgcgggacgtgtcgttttgggaaaaggctgatagtgttgttaaccagacagtaaggcatgcagttcgaggaaaagctaatggaaccgagcctcaacgacatcgacgacatgatcgtccacgaaaagatgcaggcggcgctggagtaccataacgaagcctgggccgacggcatggccgacggtatcgaacccgagatcatcgccgacacggcgatcattcacgcgcttcgcgaaaccattcggctgcacggcgaaaagaacgcggaagccttgctggaatcgttgcgagaacgcatgttggccggagagttttctccgacccgcatcctgcaataacacagagagtttcatgcgcaccgatatgaagaatgcttcgcggcctgccatcgcgccgtttttgcttgcaatcagcctcggtgccagcagccttatgggcgccccatccgccttcgcgctttcggagctgcagaagacgccgggcgtttccgacggcacctccaccgacaagccgccaagcgcgccggacgcatcatcaggcgtcccctcgcccggacctgtcatcagcaagcccgcgggccagagccccgacaccacgccgggcgcgcaggacggctcgaagccggtcgacgttctctacgatatcagcaaggtgcccgagccggtccgccgtatgcgcgagcagatcgtcgaagccgcggcatcaggtgacctcgagcggttgcgcccgctgttcggcaccggcgcgacacagacacaagtcagcgtcggtgaagcgaccgacgatccgatccgaaccctgaaggacatctccggcgaccctgacggcaatgagatcctggcaatcattctcgacatcatctcgacgggattcgtgcactctggccagggcacggccgacgagatgtatgtctggccgtatttcgcggacaaggacctgaagaagctgacgccgcccgagcgtgtcgaactgttgcgaatcgtcaccgcgggtgatctcgccgacatgcaggaattcggcggctataatttctaccgtctcggcatcacccccgacggaaaatggaagttcttcaccgccggcgactgatgcttgcgatccccgctccgacgacatacttctgagcgataacaacgcgacaggtgcgcccatgccagccgtatttctgaacgatcgcgcgctcatcagggtgagcggcgccgaggctcagtcctttctgcataacctgatcaccaccgatatcgtctcgctcgacgcgaccgaagcgcgccccggcgcattgctgacgccgcagggcaagatcctgttcgacttcatgatctggcgcgatggcgacgacttcatcatcgagaccgacgaagggcagcgcgaggcgctgacgaagcggctgacgatgtacaagcttcgcgccgcggtggcacttaccgccgaaggcagcggcgtcaccgtttcctgggacgaggcgcccgccgaaggcttccgggacagccgcttcgccaaggcaggcatcgaggtgtttcgtcgcccaggccagcacggcggcgacgacatcaccctctacgacgccttgcgcgccacccatggcatcgccgtttccggttccgactacgccttgcaggatgcctttccgcatgacgtgctgatggacctgaacggcggactctccttcaagaagggctgttatgtcggccaggaggtcgtttcgcgcatgcagcaccgcggaacggcacgccgacgcgtcgtgaccgtcagcagcaccgagccgctccctgcttcgggcacggagatcaccgccaatggcaagccgatcggcacgctcggctccgttaccggccatcgcgggctcgccatcgtcaggatcgatcgcgccggcgacgccatgtcatcggacacgccgctcctcgccggcgacgtcaccgtcaccgtggcgctgccggtgtggtcggcgctcgtctttccggccggctccgacgaggccagcgcttgacgacgaaggctccccgcgcctggcaacgcatgctttccggacgaaggctcgatctgctcgacccctcgcctctcgatgtcgaggtgagcgatatcgcccacggcctggcgcgcgtcgcgcgctggaatgggcagacctcgggcgatcacgccttttcggtcgcgcaacacagcctggtggtcgaggacatctttcggcggctgaacgaggccacgccggagcaatgcctgatggcgcttttgcacgatgcgcccgaatatgtgatcggcgacatgatctcgccgttcaagtccgtggtcggcggcggctacaagacggtggagaagcggctggaggcggcgatcaacctgcggttcggactgccgccccacccgtcgcgcgaacttaaggacaacatcaagaaggccgatacgatcgcggcttatttcgaggcctcgcagctcgcgggcttcagcgccagcgaggcgcagaagctcttcggccagccgcgcggcatcaccaaggagatgcttctcctgacgcccctgccggctacggaagcgcagcggctgttctgcgagcgcttcgccgctatcgacggcatgcgggggaagccatgacatcgatcgtcgtcgccccgcttgcccgcatcgccgaaatggccgtgcggcaccgcgcccgcgaaatgatcagcctgatggcgaaggagcaaagcttccatcgcccggcggtcatccaggcgcaccggcatctgctgctccacatgaacgacatcgccttcaagggtacgggcgatctcgtggccccggatgaaacgcatgtccgggatatcatcgacttcgcggcgcaatgggatcagagggcgccgctcatcgttcattgctggatgggggtatcgcgctcgcccgccgccgccgtggtcgtggccttgtcgctaaagccggatcagagcgaagaggcgctggcgcggcgtctgcgcgcggcctcgccctacgccacgccgaacatgcggatcatcgagatcggcgacgcgctgcttggccgcgatggacggctggtaaaggcgatcaaggggatcggccgtggtgccgacgcggatggaaacgcgccgttcgtacttgcgctggacgaagcttgacggttttaaacggttgacgcgcctgccttctgtcccatctacgcaggtcaaccgataatcatttcaaatatttggcgagatcatggaacaacaagcaacagacgcaatcctggcaacccggacggccttgagccaggcaagcgctcttgcggtgcaatactctttctccatcctcggcgcgctcatcctgttgatattgggttgggtgatggcgagcttcgtcagccgctgggcattcgaaggcatttcacgggtacgcggcatcgacgagacgctggcgcggtttttcaccaatgtcctgcactatgcgttgctgatccttgtcttcatcaccgtgctcggtcagttcggcgtgcagacggcctcgatcatcgcagcgctcggcgcggcgggtctcgccatcggccttgcgttgcagggcacgctgcagaatatcgctgcgggcatcatgcttctggtgctgcggccgttccgcgtcggcgagtatatcgcgacagccactgtcgccggcacggtgcgtgaaatcggcctcttcgccacggagcttcgcaccgccgacgggctctatctgctggcgccgaattcgaccctctggaacacgccgatcaccaattacagccgcgagaagacgcgcaagaacgacctgatgatcaatgttcgcgccggcgacgatgtggatctggcgatcaagatgctgacggatatcgcccaggccgattcgcgggtggagaagtcgccgcagccgaaaacctatatcgacgccgtgacgtcggacaagatcacgctgctgctgcgctattgggtaaagaccggcgaatgggaagacgtgcgccgcgacatcatcagccggatgaaggccagcttcgacgagaaggggcttcccattctgtaaaggcggccgccagacaggcgaccgccagatatcaaagcgacagggtaaaagctatttgatgacggcgcaggctagccgggcgccggcatcgccggccggctgactgcgatagtcgtccgagttttcgtggatcatcagggcgcggccgcggatgccgttgtccttgccatcgagcgtcaccatcccgtcgaagacctgcgccctcagcactccgtcctgcccgacatattggttcggcatatcgcccgcatgcggccccttggcggcgagcagaccatgctccgccctggtgggattgaagtgcttgcccgcggattcgtgatgggttgcggcatcgcacttgccggtttcatggacgtgaaagccgacccacttgtttgccggcaggccagacacttccaactcgatcagaacgccgcccgtggccgaggccgtcagtgcggcgcggccattgtccttgccatcggcgccggcgaaattggccgaggccgtctgcttgtcttgcgcgacggctgatgtcgtcagcgccgcgacggtcgtcagtgttataaatagaagccgtttcatcccgctgccctccttttagcactctctcacaaacgcatgcgccgtgtcggtgttcccggcagacagtgtgttgcgggaaggaggacaaagaaaaagccgaccaaacggccggcttcctgtttgatcgatccaaaagcaagcgatcaggacgcgatgtcgagatcgtactggccataggtgttcttgtagagaacattggccatgttaacctggccttcattgccggaattgagagtgccggactggcgtgctcccatcatgaatgcaaggacgccattcgacagctttggtgcttcctgggtgccctgagactggcttacaacggacaggatccccggcttctcatcagccgcacgctcactccggctcaacacgccgtcactgttggaatccaatctcgaaagagtaccgagatacgcgtaggacgtatcaagtgcagacgaaatacggctcatacaaacctccgttcaccgcattaccgatgatgtttgtacgcaatacgaatagggaaaatcagaactaaggcggtggataaactgatttgccgggtcggtcaataacttgttaatgccgtattaaccatgattgacaaagtctgacttttttcggcactcgcgatttttgtgcgaagcggcaccggcgcgggtgtcgtttaaagcgcgaaaggcattgattaatatagcgctatttctatatttgtttcgacgagaaccaaatattaatgcgaccaaaggattatgttcgttaggtttacgacacgatatcaaccttagattgcatatttttcttgttttagaacgcttcaggaatgtctttgtatgtcgcgtgtatcgcacgggatcccagcatccagaaagtcagttcgtccggcatgctcgtgccctcatcggcggcggagatgattggccatggaagctgaagcgctcttcaggcgccaatgcgcggcatcgctcaacgacgacggcaccgccgacgggcagcggctgatcaagcttgtcctggacacgtaccgcgagcaagctcgcagtatcggcggcctggaacgccacgccaaccgggctatcgaggagaacgaagcgcttcaagtcgtcctcagtcaggcgaatcgaaaccttgccgagcagagccgcctgctcgaaatcgtcctcaatcacctgccgctcggtctgtgcatcttcgattcggatcagacgctcgtcgtctccaacattcgctttcaggagctgtttgggctggacgccgacgatacgcgggcggggacgtcgatcggctcgctgatcgcgaagattgacggcctggagacgccggggtcgagagcagccacgcgcgaaagccgctccgatggcggacatatccgtcgccgcgagtgggtgatgaatgacgggcgcatcgttcagagtgtcgtcacggtccttcctgacggtagcaacatctccattcatgccgacatcaccgacgaccggaaagccgccgaacgcatcgcgtttctggcgcatcacgaccccctcaccggccttcccaatcgcctccggttccgggatcagctggacgccgcgcttgccgcgcgcaagcccaccgatcacatcgcgctcgttcacctcaatctcgatcgcttcaagtcggtcaacaacacgctcggcgtttcggccggtgacgagatcttgcggcaggtggccgatcggctgcgggcgcttgcgggcaagagcaatatcctggcacgccttggctccgatgaattcgccattctccaaaacggacgcgagcagccgtggaacgtgatggcgctcgccgaacaaatccggcgggagctctcggcacccttctttcgtggcgaaaaggccgtcgagctcagcgtctccatggggatcgcaatctgccccaaggatggcatcgagacggagctgcttctgaaacacgccggcgtggcgctgtctcacgccaagagcggcggcagacgcggcgagcgcttcttcacctcggagatggaagcacagctcgaatcgcggcgggcgcttgaggcggatctgcgcaaggcgatccacagcgaggaattcgagctgcactatcagccactttacgacatggccgaacggcgcatctgcggcttcgaagccctgctgcgctggaaccacccgacccgcgggcggatcgcgccgatggagttcattccgctggccgaggaggtcggccttatcgtcgagatcggccggtgggtcctgaagcgcgcctgcctggacgcagcgacatggcctgacggcatcaaggtcgccgtcaatgtttccgccatccagttcacgtcgggcgacctcatggacgacgtgtccaaggcccttgcgctttcgcagctctctcccggacgcctggagatcgagatcaccgagagcgttctgatggagaaccgcgacgaggtgctgccgatgctgcatgcgcttcgccagcgtggcatccgcatctccatggacgatttcggcaccggctattcgtcgctcagctatctcagcagctttccgttcgacaagatcaagatcgacaaatccttcgtcaacgacatcgtcgacaacaaggaagcattcgcgatcatgcgcgccatcattctgctcggcgacgcgctcggcatgcgcgtcaccgtcgagggggtggaatcggagcaacagcacgatctgctggcgcaggaggcctgcgacgaaatccagggctatcatatcagctcgcctcgcccggcattcgacgtgccgcagttgcttgcgcggtcgcggccgaccggcaaggcgcgggcaatgtgacatcgcattgcgactcgtcgccgctcgctctaagagaggcggtctctgtctattcctggtgcgcacatgaaagaggctcaggccttccgcccctttgaaacgcttgccgaagcgctgataccgcactcgcacgagggcgacgacggttcgcatgatctcgcgcatatcctcagggtcttcaagaatgcgatgcgcatccaggcaagcgaaggcggaaacgggcggacacttgccgccgccgtgttgctgcatgactgcgtggccgtcgaaaagagctcaccgctgagagcccgggcatccgcgcttgccgccgagaaggcttccggcgtgctggcggaccttggatggtcgcaggaggatatcgccgccgtcgcccacgcgatcctcacccacagcttctcggcgaatatcgagcccgaaacgctggaagcgaagatcctgcaggatgccgaccggctggatgcaatcggcatggtcggcgcgggacgctgcttttatatcggcgggcgcatggcgtcctcgctctacgacccgctcgatcctgccggaaacgaccgcccgcttgacgaccggcgttatgtgatcgaccatttccagacgaaactgttcaaactggccgacgggttcaagacagccgccgggcgcgcgctcgcggccgagcgcgacaagaggctgcgggactttctcgacgccttcatggacgaaatctaggagtatctcatatgcgcgtccgcgatctcttcatctatccgctcaagagcgcccgtggcatcgcgcttcaaagcacggagatcgatgccttcggccttaccggcgatcggcgcgcgatgctggtcaatccggatgggagcttcatcacccagcgcgaactgacggatctggcgcggctcgacgttcagcgcgagacatccggcttccggctcggcatgagcggagagagcctgttcgtccccctgcccgatggcagccggcgcatcgatgtctcgatctggcggtcgatcgtcaatgccgcggtcgccgacgaccaatcgaacgcggtgttgtcgcgctggctcggccgggagctcaagttcgtatttttcgacgaggaggccgaccggacggcgaacgccgaatgggcgggcgacggcacgccggtgacattcgcggacggctaccagatcctggtgaccacgaccggatcactgaaggcgctcaacgccgatatcgaggcgcacggcgaaggcagcgtcggcatggagcggttccggccgaatatcgtcatcgacacggacgaagcctggccggaggaccgctgggcggcaatcgagatcggcggcatccgcttcgacctggtgaagccgtgcgcgcgttgcatcatgaccacgcaggaccagcagacaggctctcgcgaggtcgcgaacccgatgccggccatgggccgcatccgcatgtcggccgacaggcgcgtccccggccccttgttcggctggaacgtcacgccacgcgcggcaggcgctatcgcgatcggcgatacggtgaaggttctcggcgagcggcctgatggatgggcgttcaaggtgcgcaagcgggcgtgacgttggcttagagcccttgtcttgccgcatgccggcgctgcaaaaccgctgcacgattttgcgcgacgagctttaggcctatacgtcacccgatatggcggcggctggtttcagcgccttcaacgccgcctgcacgaagccttcgcgcgccgtcgacggttccaggccgcgcggctcgtagacatggcgatgcaggaagaatgccgtcaggcgaaaggcttcggacaggctgtcgaaatcggcggcctggcgcttttccacggagagaaacgacggcagggcgaacatcctgtcggcccagggcgtgcctgcagcgcggctgaccgcgcgacccgacttcggcgagacgtaggcaagatcggcgcggctgcccgttgcggcacattcgctgagatcgagcccgaagcctagatcgttgagcacggcgagctcgaagcgaacgaacaattcgccggcatcggccgggttgtcgagattgtcgagaatgacttccagcgcctcgaagagatgcggatgcggatcgcgctccggcagaagcctgagcaaggcgcccattgcctgaacgccgtagaccgcggtcgccgtttccatcaggcgggcggcgcgcaaggtgacgggttcgacccggaattcgcccatatgctcgtccagacgggcgcgccaggtgacctcgacctcattgccgggctgcagcaccggctgcatggcgcgcgaacgtccggatcgcaccatgcccaggtgacggccgcgatccggcgtcatcacctcggtgatgacgcttgtctcgccatggcgccgaacgccaagaatgattgcacgaccttgccactgcattacaaatcgaccttccgaccacgcgttatcctagcgcatggtgggagccctgtcatgaaagcctatcaggtctcggaggggaaaagccggcgcaggaagtcgcgcatcgcgtcctcgtcgaacggcttgacgagaagcggcctgtcttgaaggtcttcgggaaaatccagcgtatccgagtagccactgacgaagccgaaaggaattccggcgacagcgacacgacgggcgaaatcgaagctcatgacctcgccgagattgacgtcaagcaaagcgaaatcatagctgtcggccaggatcgcctcattggcctgctcgacgctgttgcaaatgtcgatggtctcgacgccgacggcgcgcagaatgtcttccgcctccatcgcgatgatcaagctatcctcgagaaccagaacacgtctcgcgaccatgatcacaaagccctcttccgtgcgccgccatagacgcaccctgtatcccaaaaccgcatttccacccctgacaacccaaggccttcagccaaaaagttcacgccgcctatgcttgcatagccgctttttcagtcccggtcgatatttgagaatctcgacacaagaatgactcgtgctggacattatgagccgacctgaaaatttgcatttaaaaaagacatagatagaaccgctaaaggaatgggcgaaccttgtcgtccagcccgtcccagccggcgatcttcgcgagcgtctcgccgtccagcacctcgcaggcgcgctcctgccagcggatgagtttgcgtgcggcgagctttttcaaggtcttgttcgtgtgcacgatcgaaaggccgagcgtatcggcgatatgctgctgggtgatcgggatggcgctatggccattgaagagattaagctgcttgccgcgttgataaaggaaggcgatcagataggcggcgcgctccagcgccgtccggcggccaatgctcaagaggtgttcgtcgagcatccgctcctcctgcgccgccatccaggtaatgtcgaaggcgagcgacgggtgcttgttgtatagcgtcatcagcttgtcgcgctcgaagacgcagagcgagaccggcgacagcgcctcgatcgagtgctgcatctcccccatgatcgttccctgcaggccgatcagatcgccgggcatgatgtagttcaggatctggcgccgaccgtcctcaagcgccttgtagcggaaaccccaaccggtcagaaccgtgaacaggtgggcgctgtgcgccccttccaccaggatcgtggcacccgcatcagccgccagttcgcccttcttgaactttgaaatgaagcccagctcgtcgccggtgaactcacgaaaatgcggcagcggccgcaagggacactgttcgcagggtgtcttgaacgaatgcgtcggccgtgatgtcgccatgcgtgtcccataatccagaaaaagcggcgccccgaaatcgggacgccgctcttaaagaactcgtcacttcgtattttgttccctcgatctccagatttttgcaagaaaacgagggacttgcgcggcggccggcccgcttactggcgggggaattccaggcccatttcgcggaaacgctcgggatcgtcgccccagttctcgcgcaccttgacgaagaggaacaggtgcacggtctgctcgaggatttcggacagttccttgcgcgatgcggtggagatcgccttgatcgcctcgccgttcttgccgagcgctatcttcttctggctatcgcgctcgacgtagatcacctgttcgatgcgaaccgatccatccttgcgctcttcccatttctccgtctcgacatgcgaggcgtagggaagctcctgatgcaggcgcagaaacagcttctcgcgggtgatttccgcagccagctggcgcatcggcagatcggaaatctggtcttccggatagtaccacggcccctcgggaagcgtcttggcgagatagtccatgacgtcgtcacagcccgaaccgttttcggccgagatcatgaaggtctggtcgaaagcgacgtattcgttggcggccgatgccagcgccagcagatcctcgcgcttgacgcggtcgatcttgttgagagcaaggatcttgcgctgcggcacatccttcaagctctcgaggatcttctcggcatcaccgcgcaacccgcgctcgctgtcgatcaggagcatgatgatatccgcgtccttggcaccaccccaggcggaggtcaccatggcgcgatccagccggcggcgcggcttgaagataccaggcgtgtccatgaagacgatctgggcgttgtcgtgggtggcgatgccgcggatgacggcgcgcgtcgtctgcaccttgtggctgacgatcgataccttggcgccgaccaggcggttcagcaaggtcgacttgccggcattggtcggcccgatcagggcgacgaagccggaatgcgtcgggccagcgggttcggcggcgctacccgcgatgtcgtgttcttcggtcattgttcccgtcaatttccggcagacgatttctgccaaatgccttcgcgttcgagcatctttgtcgcggccacctgctcggcggcacgcttggagcgctcgacgcccgtttccggcttcacaccggcgacttcgaccgtcaccgtgaagcgcggatcatgatccggtccggtgcgttcttcaacccggtagtttggcgtcacgccgaatttggcatgcgaccattcctgcaattccgtcttggcgtcgcgtcgggcgccatcggcgcgcaccgcgcgcttttcccaatacttcacgatgaagcggcgcgcgacctcaaggccggcgtcgagatagatcgccgcgatcaggctttcgacgacgtcggcgcgaacgttcatcatgcgcttgccggtgagcttcttcacgtcggcgccggtgcggatatagagatgcaggccgagttcgtcggccacctcggcgcaggtatcggcgctgaccagctggttcaggcgtacggagagttcgccttccgatgccgcgccgaaggtcctgaaaagcatctcggcgacacacaggccgagcacccggtcgccaagaaactcaagccgctcgtagttgccgcccttctgggtacgggcgctggcgtgggtcagcgcgcgatccaggcgctccttctcggcgaaaacgtgaccgatcagcgcctcgagctttgttcggtcggccgccgaaagcgtcggcgacttgctcattcaacgcccttgaacaaccgatcccaacgcatgttggaaggccacttccagatttcgcggaaagaggtgtcgttgccgagcgagaagaagatgacgctggcacgaccgacgagattctcggccggcacgaagccgacatcgaagcggctgtcgagcgagttgtcgcgattgtcacccatcatgaagtagctgccttcggggacgatgaactcgcgcgtgttgtcgccgcgcgaaaccggagactggtcgagcgtgtcgtaggtcacgccattatccagggtttcgcggaacaccggaacgtcctggcccggatcctgtgcgtagtcggagttgaacgtgccgtcctgcaccttcggaacagccttgccgttcacgaaaagcacgccatcggtcacctggatgcggtcgccgggaaggccgacgagacgcttgatgtaatcgacttcggggttcggcgggaagcggaagacgacgacgtcgccgcgcttcggctcgcttgcgaagatgcggccgctgaacaggttcggcgagaacggcaacgagtatttggagtagccgtaagcgaacttgttgacgaagatatagtcgccaaccagaagcgtcggcatcatcgagccggaggggatggtaaagggctggaacaggaccgtgcggatcaccatcgccaagaccaatgcctggacgatgaccttgatgttctcccagagggcgttcggcttggcttgaactttttcggacacgcagttctattccttcagagcgccaaaacggcgcaagtctttaatcggttctgtgtagcggcttcggctgattgcggcaatgccacgaacattaaaagcccgagatgtaacgatcagttgcttagcggcagtgcctcgatgattacgaaggcctgcgccaagggataatcatcggtaattgtcaaatggatggcggcgcggtgccccgcaggcaacatcttctgcaaaatctcgccggcgccgccggtcagcttcatcgtcggcttgccgctcgggagattgacgacacccatatccttccagaagacaccctgggcgataccggtgcccaaagccttcgaacaggcttccttggcggcgaaacgcttggcgtaggaggcggcgcggttggcgcggcggtcggatttctgctgttcgatctcggtgaagcagcggttggtaaagcgttcaccgaagcgctcgagcgatttctcgacgcgccggatgtcgatgaggtcgctgccgatgccaatgatcatactgtctcctcaagcgaaacgggatcggcgacccgcaggcgcgcgcgctcgatcaggcgggcgcggcggcgtccctggaagccccggacagtgtagaatgtcgcgaaatacatcgccaaggcggtgacgattgccggcggcaacgacccgatcagcatcggctccagcaccggacgccacagctcgctgaagtggagctcgtgcaggagcgcgggaagatccaccgcggtgccctgcatcgtattgtcgccgctcaagagcagccgcccgatttcccaggtcgttccccagatgaacgggtaagtcagcgggttgccaaaggccgcgcagccgagagccgcggccaccatgttgccggagaaaacataggtgagaatgaaagccatgacgaaatggacgccgacgaacggtgtccaggagacgaatgctcccgccgcaacgccgatagccaccgcatatggcgacgccctcaggcgcagcacgcgcataaccagatagcgcggcggcctcaggaatccctttcgtggccaaagcagctcgcgcagcttctcacgaaatccagcgggtttccgacgacgaaataacatggcgcgtatgtagtgcatgccgcacaggcctgacaagagcgccagaccacctcgaccgctatttgatgtgcgccggccgagtatccaccggggcgtaactcaaacgccccttcccacttgcaaatccgatagccgattaacgggtacggaacagaccacggtcaacctgacgctgacggtattccagatcgatgcggtcgaacgaaccgttcaggtacgcggtttcgcgttcttcagcactcggagcgcgcagggcacgagcgaacttcttgatcggtgtaaacatttggatgcctcttctttcagtcacttgtcgatgaccagaagataggcggcgcggagcgcttttaccaacgctctaactctcagtcagccatgcgcaaaatgcatacctagccctttatctgcgacaatctgaccacaaaacgatcacataatgtgcaaacagagtgcaaatgcgcccggtttactcgtagagtctgcgaacggtcgcgatgcaatcaagctccgtcaactgcgcaagcaattgattcagctgacgaagatcccaaacctcgacgtccagcgccatctcggtgaagtcggtggcgacgcgaaccgtgttcaagacgcggatgttgacgtcgacatcggcgacggtgcgggcaagcttggcgagcgtgccgggctcattcagcgcgttgacgaggatgcgggccatgaagcgcgacttgttggcctcgtccagatcccagcgcacatcgatccagcgatcgggctgttcgtcgaagcgctgcagcacgggcgactggatcgggtagatcgtgatgcccttggcgttctcggtcgtgttggtgataccgacgatgcgatcgccggggaccgcaccagtcggcgcgaactgcacgtcgatattgctcgagatgccacggatcggcacggactcggcgtcgccgagtgcgccaaggccgctcgcggggtgttcgccggccttccccttgtccgggatcttgaagatcatgccggtggcgctgcggacgttgaaccatccatcgtcgcccgagggcttcgaggtgatgcgttcttcctggtgatcggggtagacggcgcgcagcacgtcgagcgacgacatctcgccacggccgacggaggcaatcgcgtcctcgacatccttctggccgagacggtgcagcgcgggcttcatcgcctcgcgggagaagaccttgccggcgcggtcgaaggtgcgctcgagaatgcggtggccgaggccggcatattgcttgcggatggccatgcgtgtggcgcggcgtatggcggcgcgcgccttacccgtcacgacgatctcttcccaggccgccggcggcacctgcacgccggaacggatgatctcgacctcgtcgccattcgcaaggcgggtgacgagcggcatgatgcggccgttgatcttggctccaaccgtggtgtcgccgatgttggtgtgaacagcgtaggcgaagtcgatcggggtcgcgccgcgcggcagggcaatcagcttgcccttgggcgtgaagcagaagacctggtcctggaacaattcaagcttggtgtgctccagaaactcttccgggctatcgccctcggccagcgcctcgatggtgtggcgaagccaggaataggcgttggattcgcgcgagaggatgtcgccatcgccattcatcgcgccgtccttgtagagcgtgtgggcggcgataccgaactcggcgatctcgtgcatgcgcttggtgcggatctgcagctcgatacgctggctcgacggcccgacgatggtggtgtgcagcgaacgataatcgttctgcttcggcgtcgagatatagtccttgaagcggccggggacgacgcgccagcgggtgtggacgatgccgaggccgcgataacaggagggaatgtcgtcgacgatgatgcggaagccatagacatccgacagctgctcgaaggagagcgacttcgactgcatcttgcgaaagacggaataaggcttcttctggcgacccttgacgtaggcattggtcaggccgttggcgacgagcaggtcgcgcaattcggtctcgatcttcttgaccaggccttcgttgcgccgcgacagctcctcgagccgcttggtgacggtgtcgtaggcctcggggttgatgtggcggaaggacaggtcctccagctcctcgcgcatatcctgcatacccatgcggccggcaagcggcgcgtagatatccatcgtctcctcggagatgcgggcgcgcttttccggcgacatgtggtcgagggtgcgcatgttgtgcaggcgatcggccagcttgaccagaagcacgcgcacgtcgtcggagatggcgagcagcagcttgcgcaggttttcggcctgcttggccttcttagtgacgagatcgagcttcttgatcttcgtcagcccttcgaccaggcggccgatatcctcgccaaacagctcatcgatctcggcgcgggtcgcggtggtgtcctcgatcgtgtcgtggagtagcgcgaccgcgatggtcgactcgtcgagatgcatgtcggtcaggatggcggcgacttcgagcgggtgcgagatataggggtcgccgcttgcccgcttctgttgcccatgcttctgcatggcgtagacataggctttgttgagcagtgcttcgttggcgtcgggcttgtatttctgaacccgctccacgagctcgtactgccgcatcatgccgaaaccactccattacaaaagaaaagcgcgccaatcacagattggcgcacgtgatactcaatcatatgccgaagcaataatggcgcaagattgacgattagtaatcgtcgctcttttccggcggcacgaggccttcgataccggccagaagctcttcttccgacatctggtcgaaggtgatcgtctccggagcatcgtcctgctcttcgccatcggcggcagccgcggtggcgatgaggcttgccggatcgggctcgggctcgtcgacttcgacgtgcttctgcagcgaatggatcagatcttccttcaggtcgtcgggagacagcatctcgtcggcgatctcgcgaagggcgacgaccgggttcttgtcgttgtcgcgatcgatggtgatcgatgcgccctgggaaatcagccgggcacggtggctggcaagcagaaccagctcgaagcggttctcaactttgtcaatgcaatcttctactgtgacacgggccattgcctgtcctttacggtcgggatctcgggattagcacggcgatacaattaaaagcaggcgaattcaagtttttagtgaagggcccgttcgagcctgtgggaactttctaattttagaggtttccactaaaagttgcttggaatatgtcgaatcctgccctaaatctgacttatatgaatagttcataaagtaagaattgttctgaatttttcagataacccattgttttcgtgggttatctgcagccgaattttagattactcaaagtggattggtacgcgatgttcgacccgcgagaaaaaattgcactcttcatcgatggcgccaatctctatgcggcgtccaagagcctgggctttgacatcgactacagaaaacttctgaaagccttccaaaagcgcggctatctgctgcgcgcctactattacaccgcgctgatcgaggatcaggaatattcctcgatccgcccgctgatcgactggctcgattacaacggctacaaggtggtgaccaagccggccaaggagttcaccgactccatgggccgccgcaagatcaagggcaacatggatatcgaactcgcgatcgatgccatggagcagtcggaaacggtcgatcacctggtgatcttctccggcgacggcgacttcacgacgctggtcgaggcgctgcagcgcaggggccggaaggtctcgatcatctcgaccatggcgacacaaccgccgatgatcgccgacgatctgcgccgccaggccgatcacttcatcgacctcttgtccctgaagagcgaaatcggccgcgacccctcggagcgccctgcccgcccggtggagcccgcggcatccagcgacttcgagagctagagttacaacgctcgaaaagaaaaccgcggcagttgccgcggttttgattcaggctccaatcagccgttgtccttgagaagccggctcttctgccggttccaatcgcgctctttttcagactcgcgcttgtcgtgcagcttcttgcccttggcgagcgccagttccatcttcgcgcgaccgcgatcgttgaaatagatcttcaacgggatgagcgtcatgccttcgcggttgatgccggcacgcagacggttgatctcgcggccggacagcaagagcttgcggcggcggcgaggctcgtggttgaagcggttggcctgcagatactccggaagataggaattgatcagccagatctcgccaccctcgtccgatgcgtaggattcggcgatattggccttgccttcgcgcaacgacttgacctcggtgcccatcagcaccaagcccgcctcataggtatcgacgatctcgtagttgtagcgcgccttgcggttttcggcgacgatcttcttgacgacgcgctggctgcctttgggggccatgacaaattccaatttctcgggggcgcgatatccgcgcccgcacttctcggctttatgtagaggcgcggcccatctttgtgaaggccgcgcgttttatcggttcaacatgctatcagtttagcaggccggcgtggcgcagcgcggcgtcgagcgcggcttccgtgcttgcctccagcgaggagacgagcggcgagcggaccgtgcggttcatgccgcggatcttcgacaggccgtacttggcgccacagaggcccggctccaggaaaatcgccttgtgcaacggcatgaggcggtcctgatactcgagcgccttggcgaaatcgccagccagcgtcgcggcctggaactccgcacaaaggcgcggggcgacattggccgtgacagaaatgcaaccgacgccgccgtgggcgttgaagccgagcgcggtcgcgtcttcgccggagagctggcggaaatccttgccgcaggtgatgcgctgctcggacacgcgctcgatcttgccggtggcatccttgacgccgacgatattgccataggccttggcaagcgcgcccatggtttccggcgtcatgtcgatgaccgagcgacccggaatattatagatgtagatcggcagcttgatggcttcggcaaccgccgcgaaatgggcatagagacccttctgcgtcggcttgttgtagtagggcgtgacgaccagaacggcatcggcgccggccttttcggcatgctgggcaagctcgacggcttcgcgggtgttgttggagccggcgccagccatgacgggaacccgcttggcggcagcctcgatacagagttcgacgacgcgtttgtgctcggcatgcgacagggtcggggattcgccggtcgttccgacaggaacgagaccgctgctgccttccttgatctgccagtcgacatgggcggcgaaggccgcttcatcgacaaggccggaatcggtgaaaggcgtgacgagtgcgggaatagacccctggaacattcagaactccttacggccgcaatccatgcttcggccgcattcctttaatatgaggagcgcaccatagtgcggcaaaatgggtccgacaagcgcgcagagctttgttgcaacaaattccaatcgcaaatgtgaatgaatttgaacggcttcggtaaggtttcgttaacccacgtcccagcaaatggatggacgcgtttccattgcgagtgtccctgatgaagagagctgttctgatcctatccgtgctcggcctgacggccggcccatggagcacgtttgccgcgcagcttcccggcgaagacgcgcccgttccgaacgtgaagccgttgggatatctgccgcaaacgtcttcgccagcgtcgatcatcacgggctccattccgcgcgcccaggcggttgcgcccgtcaacagcgacctgaaggccgggctcgacgcgctctccaacaggaacccgatgcaggcgatttctatccgcgacagcatgcgccagggtacgctcgaccgccacattctgacctgggcgatcgtggtttccggccagaaaggcgtgccatcggtcgagatcgcgaccgccgccagagagctgagcggctggccggggcttgccaagctgcgcccctattcggagcgcgcgctttacgatgaaaatccctcgccctcggccgttcttgccgccttcggcgaaaccgctccggaaacgacatccggcgcgatgatcttgtcgcgcgcgctcgtggcgaccggcaagcaggcgcaggccgcgaaatacatgcgcaaggtctggcgcggcgagacgctggacaagccgatggaggacaagatcctcgccgaattcgccggccttctcaccgttgccgatcacaaggcgcgcatggaatatctgatgtaccgcaaccgtaccgcccaggcgaagcggttcggcgatctcgggcaggcgcagtcgctcttcaaggcttgggaagccgtcaccaacaaggcgccgaacgcgggcgcgcttctggctggcgtcgacggcaagtggagcggcgatcccggctatctcttcgcgcgcatcgaatatctgcgcaagcaggacaagtatgtggaggccgccaagcttctgcagcagatgccgcgcgagcgcggcgaactcgtcaatgccggcgaatggtggaacgagcagcggatcatcagccgcgggctggtggaccagggccagttcaagctcgcctacagcatcgtttcgaaatacgcggcggcgacgccgaccgatatcgtcgaggccgaattccattcgggttggtacgcgttgcgcggcttgaaggatccagcgacggcgcaggcgcatttccgcaggattctcgacgtgtccagcggtccgatttcggtctcacgcgcctggtactggatgggacgctcggccgaagcgggtggcggcggcaaggccgccgagttctacgccaaggccgcgaactattcgacgaccttctacggccagcttgccggcgagaagctgggccgcaaggccatcaatgtcagctacccctcgccgagttcggcggaccgcgagcgataccagcagcgcgaggcggtgcaggccatcgcgcggctcgatgcggccggccacggatggcgcgccaatgcgctctatcttgcgcttggagaacagatgcagagcccgggcgaactggcgatcctcgccgcgcaggccgagcgcaccggcaaccatcagctctcgctgcagatcggcaagagcgcctatgcgcgcggcatcgatgtcgcggcgcttgcctttccgatcggcgtcattccgggcaccgccaacatctcgggctccggcaaggcgctcgcctatgcgatcgcccggcaggaaagcgccttcaacccgaccgcgatttcggcggccgacgcgcgcggcctgctgcagatcctgccgggaaccgccaaggccgtcgcgaagcgcttcaacatcgcctactcccaggacaagctcaccacggacgccggctacaatgcaacgcttggcgcgcattatctcggcgagcagatcgacgcgttcggcggctcctacatcatgaccttcatcgcctacaatgccggaccgcggcgtgttcccgaatggatcgagcgctatggcgatccgcgcggcaaatcgatcgatgccgtcgtcgactggatcgagcgcatccccttccccgagacgcgcaactatgtgcagcgggtgatggaaaactaccaggtctacaaggcacggcttggccaacccgccagcatcgagcgcgacctgatcggcggccgcaccgcgtcctaggcaatgtttgcggaccggcccgctggacgctagtctcttctcgtcaaggtgaggagagacgatgcacgatacgaacagcaagtcctttcaggaccggacctacatttccggagatggcctgacgctgcatctgcgtgactatgatcccggtcctgctgtaaccgatggccggttaccggtgatctgcctccccggccttacacggaattcacgcgattttcatgcgctggcactggttctctcgtgcgatccgctttccgcgaggcgggtgatcgcgctcgattaccgtgggcgcgggctttcagaccgggacgggaacaaggccaattataatctcgccgtggaagctcaggacgctatcgacgcctgcgcgtttttgaacatcgaccgcgccgcctttatcggcacgtcgcgcggcggcctcatccttcatctgctcgccggaatgaagccgggcctgattgtggcggccgttctcaacgatatcggacccgtcatcgagaccgacggattgatgaagattcgcgacgatctcaacggggcccggctgccgcgcgatatgcaggaggcggcgacgttgctgaaactgcggcatggcgccgacttccctgccctctcaaatgacgactgggcggagatggcggcggcgatctatcgcgagatcgatggccacctcatgcccgatgccgatcccgccatcgccagacagttgctgtcgatcgatttcacgaaaccgcttaaggacctctgggcgcattataagaatttcgcgccgctgcccttgatggtcgttcgcggcaagaattcggcgctgctttcagagaacacgctgacagccatggccgagggacatcccggtctcaagatcgtcagagttcccgaccaaggccacccgcccctgctgcatctggagccggccctctcgaacatcagagaatttctctcggccgtctgacgagttccgagcctgctctcaggtgccctgctttccgaaagatcctgcgtagcgccatgaatgcaaaaagcccggttcttgcgaaccgggcttccctgattagaccgaagtcagatcagattagaatgcacgctgcagacggaagtagccggtcgtgacatcgtcgccattgtcttcgtccaggtactgaaccgaagccttagcgtagaagttttctacgatctggtagtcaaccgtcaggccaaccttccaagcgtcgttgtcagagaagtcgtcgccagcaaggccgtagctgccgaagtactgaacaccgggggtgatcttcagcttgtcggttgcctggatggcgtattcagcagcgacggtccactcggattcgtcgtagtaagcgttggcgccggaggcccaagcagctgccagaccgagcgtgcccggaccgatggcaacagtgcccatgccgcggatcgcgccttcttcagtgtcggtgtcgtagccgccgatcagctggtagctgaacgcgccggccttgccgccgaggccgagagcaacgccaacgttgttgtcgttttcgccagcgtggacaacgccttcgagttcgtcaacagagataccggcgtagaaatcgccagattcatactgataacggatcgagttatgcagcgtgtcgtggcttgcgagaacgtcggtttcgcccgagaggccatcgtcccaccagctgtagaacagaccagcgcggaagccggcgatgtcgatgtaagccgagtcaaggatcgttgcctgctcggcagcgttgtcagcgttagcctggagaacgattacgccggtgagcgggccgtattcggtgtcgctcttagccgtgaactgaacctgaccacgcgtgaaagcgtcccaatcagacgagccgctttcgttcggaccaacgtcaacctggaaacgaacgtagccttcgatcttcaggcaggtttccgtgcccgggatgtagaagtagccggtgccgtatgcgtcgcaaacgcgaacgtattctactgcttccggttcagctgcaacaatcgcgtcagcagcctgagcaccggatacaactgcgagagcagctgcggagccgagaagtaggctcttgatgttcatattgacctccaattcaaagtttcgatcggatccgggttttcgccgttttggcagcgttccctgccccgtcaccgtgtttcaagaagtcggacgatcaaccgccctcgcttccgaagttgaaaatacaagacccggcctgtcacgcaatcaccaacttgtccgattggggcatttgcaacagccttccgtatgcgctgttgctgaaaggtcacaaatacgacatgcggccattccgtttctttatacttcgttaagaaagcgctggttttgcgggggtttagtgccgctcgagcgcaggacggaacacggcgatgtgccacattggaaccgttttccggccagattcggtgggataagccataagtttagcaggtgaataaataagccagatgacagatcggcgaatgcagccgtgtggaatcgcttggcgtgcgccgaatgattctcaaaacgattctggctcgcgccgtcatcgtcgcgtcatgtgcacgacgacaaggtcgagcgcatgaacacgcaatcgcggcgtgcgcatgtggatagagatgacgagaatatctgactgagggattatttgttgtccgggccggacatcgggatgatggcggagaagatgggattcgaacccacgatacccttccgggtatactcccttagcaggggagcgccttcgaccactcggccacctctccggtcgagagcctgatagagtcattcgctgggggacgcaagcgcttttcggctttgtccctgaagaaaagctggcttatttctaagccagcaactgcttcagatcggaagacgcatcggccaggatcgacttgtcggggtttatgccgagttccagcatcttcttgccgctgacataggccttggcgtcgttgatcgcgtcgacggcgatgaacctgcctgatttgaagtaccagaccgaatgcgcgccctcgcgcgcgccggggcgcaggagcgtctcgtcgtagccgagattgaagccggcgatctgcagcttcacgtcatattgatcggaccagaaccagggcttcggctcatagggcgtgttgccgccggcgatgacggctgcggccgcgtcggcctgatcgaccgcgttctgcaccgattcgaggcggatgcgccctccctgccagggaagggccgcgcagtcgccggccgcgaagatcgagggatcggaggtgcgcgcgaattcatcgacgacgatgccgttcgcgacctcgaggcccgattccttggcgagctggtcgttcggcgtaacgccgatgccgacgatggcgaaatcgatatcgatgatcgagccatcggaaagttcggcgccgacgagcttgccgtcgcgtccgagcagatgcttgaggccggtcttttcgcgaatctgcacgtcatgctcttcgtggatgacgcgcatgatatccgcggtctccttggcggcgacgcgctgcagaatgcggtccgccatttcgatgacggtgacttcgaggcccagatggcgcgcaacggcagcggcctcgaggccgatatagccgccacctataataaggacgcggcggccggggcgcatctcggcggccagcagatcggcatcgcgtttgtcgcgggcgacatagacgccctcgagatcgccgccgatcgcggccggcaggccgcgcggcgtagaccccgtcgtcagcgccagcgtgccgtaatcgatcatggagccatcctggagcacgacctgcttcttgtcgcgcttgatctgctcgacccacgtggacaggcgaatctcgacgtcgttgtcggtgaaccactgttcaggacgaaacagcagacgatcgaagctcatttcgccgagcaggtacttctttgtgagcggcggtcgctgatagggcagcacgtcctcggcgcccagaatggtgatgggcctggtatccttgagcgcgcgcagcttggccgccatcgcaaagcctgcctgacccgcgccgataatcaccaatctgtccgtcacgatctcactcccgcattcactgtattgagcaaaggcctatcccctgccccttgcgtcgtcaaccggagcggagcgccgtcaggcgatctcgatccagcggcgctggtgaaacgactctgccatggcgtgaacagacttttctatcctaagaccgtcttcgaatgtaacgatcaccgacggctcaccggaaatcgcgcgaatgagttcgcggcattcaatgatcttcagatcgttgaagcccaggccgtggccgggggcgggaatgaagcggtcatagggatggtgggcgggcgcggcgaggatctttctgaacccctgctcgctgccgcggccatcggcctgatagagctcgaattcgttcatgcgctcctggtcgaaggtgatcgcgcctttcgagccgaatatctgcaaggctatgcgccccttgcgaccccaggcggcgcggttggccatcaacacggcggatatgccgccgtcgagccgcatcagcaaattggccgcgtcgtgattctcgaccgtgcgtcttccaccgtccttcatggggcgatcggcatagggcctggacatgtcggccaccacggcgtcgacgtgcccgaagaggtaccagagcaatgacagcgggtgcacggcgaaatcgtcgagcgcgccgtagccggccgacaattcgctcttccagtagaagagcgcatccggatcggccatgaagtcctcgtccatctcgacgcggatgtgattgacctgaccgatggcgccttcgccgatcagcctcttgatgtggcgaatgatcgggttctggatatagttgtagccgagcacggccaccttgccggcgcgcctggcggcatctagcatgcgctcggcgtccgcaaagaccggcgccataggcttttcacaccagacatgtttgcccgcttcgagggccgcaatcgccatctcgggatggaactggttcggcgtggtgaccgagacgacatcgacatcgggatcggcgatcagctggcgccaatccgccgtcgccttttcaaagccgaattccgaggcgcgcgcatcggcgagatccttgctcgcctcggccagatgcacgaggcgcggacgctcgacatcgccgaagacggtcttgaccgcattccatgcaagcgcatggcacttgcccatatagcccgtgccgatcaggccgacgcccagtgacttcatgatctcccctccatctcccggcatgattttggaatggttggaccattttggcaagactggccggcgagcccgcacgcgcgcgaaagccaccaaccagcggaaatagctcgatattccccacacaaaaaacaaatatgccggtgaatggaaatcatctatggtcgaaaaactggaatatacgtttcattttcggatcagcacatggacaacgaccccaaggccccttctcgcgttcccagggacttcgagagcctgcgcagcacgatcatcgagcgcaaggcgaccatgccgaagcggctggcgcaagtcgcagcctttgcgctggccaatcccgacgagatcgccttcggcacgacggcaagcatcgcctctgcctccgaggtgcagccatcgacgctggtgaggctggcgcatcacctgggatatgagggcttttccgacctgcagagcatttttcgcgagcggctgcgcgaccggacgctgacatacgaagagcggttggtgacgctggagcaatccaccggcgaggacgaggacgccaatctgctctccggcttcatttcggccgccggtcaatcgatcaaccggctggcggcgaccgttcagtcggacactttcagcaaggcggtggatatcctggcggcggccgacaccatctatcttatcgccaagcgccgctcctatccgctgaccgcgcatatgagctacgccttctcgaagctcaatatccgacaccagatcgtcgcctccccgaacggggtcgatcccgaaaccgtccagttcgccacgccgaaggacgcggcgatcgccgcgagtttttcgccctacgccgccgagagcctcggccaggcggagatgctgaaggaacgcggcgtgcccgtcgtcgtcatcaccgattcggccttctcgccgctcgccacaagcgctgcctgctggtttgaagtggcggaggccgacttcgccggtttccgctcgctgtccgcctcgatggcgctgaccatggcgctgccggttgcgatcgccgagcggcggcgaaagctgggacagccaaaatccagaaaagcaaaaatggaataaacattctgaattgacattcaaacggaaccgatgtttcattgaccgatatcaccggcgggcatccacgccggatcgaaaatgatcgggaggacatgatggcagtaactcaaccgggcacgaatccggggccgtcgcttgatgtgatcgccatcggccgctcgtcggtcgatctctatggccagcagatcggttccaagcttgagaatatcgcctccttcgccaagtcggtcggcggatgcccggccaatatcgcgatcggcaccgcgcgcctcggcctgaaatcaggcctgatcacccgcgtcggcgacgagcagatgggacgcttcattcgcgagcaatcggcgcgcgagggggtagcgaccgacggcatcgtcaccgacaaggagcgtctgaccgcactcgtgcttctggcggtcgaggccgagggcgtctcgccgactatcttttatcgttccgactgcgccgacatggcgctcgaggaaaccgacatcgacgaagcctatataaagtcctcgcgctccgtgctggtttcgggaacgcatttctcccggccgaacacagaagcggcgcagcgcaaggcgatccggatcgccaaggccaacggccgcaaggtggttttcgacatcgactaccgccctaacctctggggtcttgccggccatgcggaaggtttcgagcgctatgtgaaatcggatcgcgtgtcctccaagatgaaggagacgctcccggactgcgacctgatcatcggcacggaagaggaaatcctgatcgcatcgggcgccgacgacgtgctcggcgcgctgaaggagatccgccgcctttcgcccgcgaccatcgtcctgaagcgcggtgccatgggctgcatcgtctatgacggcccgatctcggacgatctcgaagccggtatcgtcggcgaaggcttcccgatcgaggtgttcaacgtgcttggggccggcgacgccttcatgtccggcttcctgcgcggctggctgaagggcgagccgctgaagacgtgcgcgacctgggcgaatgcctgcggcgcattcgcggtctcccgcctgctatgctcgccggaatatccgacctgggcggaactcgatttcttcctgaagaacggcagcaagcatcgggcgctgcgcaaggacgaggcgatcaaccacatccactgggcctcgaaccggaaggacgatatcccgctcctgatggcgctcgccatcgatcatcgttcgcagctgacgagcgtgtgcgacgagctcggcgtcgattacaagcagatcgtcgccttcaagcggctcgcggtggaggccgccgcgcgcgttgccgatggccgcggcggctatgggatgctgatcgacgagcgcttcgggcgcgatgccttcttcgacgcggcgaccaagaatttttcttggatcggacgtcccgtcgagctgccgggctcgaagccgctgcgcttcgaattcagccaggatatcggttcgcagctggtggaatggccgctcgatcactgcatcaagtgcctgtgcttctatcatcccgacgatccggcggagctgaagagcgaacagcaggaaaagctgcgcacgctgttcgaggcggcacgcaaggtcggccgcgaactgctggtcgagatcatcgccagcaagaacgggccgctcaccgacgacaccatctcgacggcgatggaagaactttatgcgctcggcatcaagccggactggtggaagctggaaccgcaggcatcgagcgcggcgtggaagaagatcgacgccgtcatcgccaggaacgacccatggtgccgtggcatcgtgctgctcgggctggaggcgccggcggacgagctggtgaaaggcttcgaggcgacgctggcagcaccctcggtcaagggctttgccgtgggacggacgatcttttcggatgcggcgcgggcctggctgtcgggcaagatcgatgacgagcaggcggtcaccgacatggccggacgcttccgcgaattgaccgaagcctggttgaaaacgcgcgggctgggctcttaattacgagtagccccctccccaacccctctccacaagggggcggggctttaacttgaggcaatgccctgccacgaacgaacgtcccaacggacgcaaggttgaggcgaagcgaagtggttgccacaggttagcccctcccccttgtgggaaggggttggggaggggaaaaacggatacgagaattgcgggaggagcccgatgggcaagactgtacgattgacgatggcgcaggccgtcacccactttctgaagaatcagatgacggtcgtcgacggaaagacggtgccgattttcggcggcgtctgggcgatcttcggccatggcaacgtcgcgggcatcggcgaagcgctctatcaggtgcgtggcgagctgacgacttatcgcgcgcacaatgaacagggcatggcgcatgcggcgatcgcatacgccaaggcgagcttccgccagcgcttcatggcctgcacgacatcgatcggccccggcgcgctcaatatggtgaccgctgccggcgtcgcgcatgtcaaccgcatccccgtgctcttcctgccgggcgacgtcttcgccaaccgcgcgccggacccggtgctgcagcagatcgaggacttcggcgacggcacggtgtcggccaacgacgccttccgcccggtgtcgcgctatttcgaccgcatcacacggccggaacagatcatcccggcgctgaagcgcgccatgcaggttctgaccgatccttatgattgtggtccggtgacgctgtcgctttgccaggatgttcaggccgaagccttcgattatccggaaagcttcttcgaggagcgcgtctggaccacgcggcgccctcgccccgatgccgacgagctggcgaatgccatcgcgctgatcaagaagtcggaaaagcccgtcatcatcgccggcggtggcgtgctctattcacaggccacgaaggagctgacggaattcgcggatgcgcacggcattcccgttgtcgtcacgcaggccggcaagtcggcgatcgacgagcgacatccgctggcgctcggttcggtcggggtcaccggcacatcggcggccaatgcgcttgcggaagagaccgatctgctgattgccgtcggcacgcgctgccaggatttcaccaccggttcgtgggcgctgttcaagaatgaaaagctctccgtccttggcctcaacatcgccgcctacgacgccgccaagcatgacgggcaccccctggtggcggatgcgcgcgaggggctgaaggcgatttccgagggtctttccggctggaaagctccggcagcactggccgcgaaggccgagaaagagaagaagatctggatggatgccgcagccaaggcgatggcggcgaccaatgcggcgctcccctccgacgcccaggtgatcggcgcggtcacacgcaccatcggcggagagaacgcgatcgcgctttgcgcggcgggcggcctgcccggcgaactccacaagctctggccggccacggcgccgggcagctaccacatggaatacggcttttcgtgcatgggctacgagatcgccggcggcctcggcgccaagatggcgcaccccgacaaggacgtcatcgtcatggtcggcgacggctcctacatgatgctgaattccgagctcgcgacctcggtgatgctgggcctgaagctcaacatcgtcctcttggataaccgcggctacggctgcatcaaccggctgcagatgggcaccggcggcgccaacttcaacaatctcttgaaggacgcctatcacgaggtcatgcccgagatcgacttccgcgcgcatgcggaaagcatgggggcgatcgcggtgaaggtgtcctcgatcgccgagttggagcaggcgattatcgattcgaggaagaacgagcggacctcggtgttcgtgatcgataccgatccgctgatcacgaccgaggccggcgggcactggtgggatgtcgcggtgccggaggtgagttcgcgcgaggaggtcaacaaggctcgcgccaattacgtgaaggcgcgcgaagcgcagcggattgggtgatttgagacgttagagcccggagccccctcatccgcccttcgggcaccttctccccgctggggcgaagggaaggtcggagcgagcggcctgccacacatcccttctccccatcggggagaagggatgtgtggcaggcggatgagggggccgcgctcgctgattttagagaatgacgaggagacacaacaatgaaagccaaacttggcatgtcgcccatcgcgtggtggaacgacgaccttcccgaactcagtgacgacgtatcgctggaagaatgcctgcgccaatcgcgcggcgcgggctttaccggcatggaacaggggcgccgcttccccaacaatccgcgggagatgctgccgatcctgaaggccgccgacgtgacgctctgcggcggctggttctcgggcacgctcatcgacgaggagcttgctgccaacaaggatcgcatccagccgatgatcgagctcttcaaggccgtcgatgcgccgtgcatcgtctatggcgaggtcggccgctcgatccagggcgaccgctccaagccgctcgccaccaagccgaaactctccgacgacgagatgaaggcctatgcccgccgcgtcacgcagttcggcgaatggtgcgccgaacagggcatgccgctctcctaccaccatcatatggcggccgtggtcgagaccgagccggaactcgacgccttcatgcgcaactcgggtgaaggcattccgctgctgctcgacgccggtcacctcgcctttgccggcggcgacgtgctgcgcgccatcgacaaccaccacgcccgcatcaaccatgtccacgtcaaggacatccgcaagtcggtggtcgacggcctcgaccgcggcaggcagtccttcctcgacgccgtggcgctcggcgccttcacggtgccgggcgacggatcgctcgatttcgaggcgatcgttcagcgcttcgccgattacggctatgagggctggttcgtcgtcgaggcagaacaggacccacgcaaggcgccgccgcagaagatggcggagatcggtcactccgaactcatgcgggtgatgacggctgccggatatacggtggagacggaagggtttccgaagggctagtctcacgcgagaacggtgggtgggatacccccctctgccctgccgggcatctcccccacaggtggggagattggctgggcgtagccgctcgctctaccttcattgtttggcgtaaacctcaccgcatgtcgatctccccccttgtgggggagatgtccggcaggacagaggggggcgccacacccacgaatgttcacgaggagaaacaaatgccaaacctcaaagtcaaaccatcaggcacgcatggccgcgtcacccatgtcacgcccgagagcgccggctggacctatgtcggtttcgacatgcacaggctgaaacccggcgagacggtgtcgggagagacgggcgagcgcgaggtgtgcctcgtctgggtgagcggcaagggcaaggccagcgccggcaccagggaattcggcacgctcggcgagcggatgagcccgttcgatggcgcgccgcatgcgctttacatcccgatggaatcggcctggtcggtgacggccgagaccgatctggagctggcggtctgctcggcgccgggtggcggtgcctatgatgcgaaggcgatcccgccgggcacgcatccgccgctgacacgcggcaagggcaccaatgtgcgctacgtcaacaatatcatgcccgaggatgacgcatcggcctattcgctgctcgtcgtcgaggtgatcacgccgggcgggcatacctcctcctatccgccgcacaagcacgatcaggacaacctaccgaacgagagcttcctcgaggagacctattatcaccgcctgaacccgccgcagggcttcggcttccagcgcgtctataccgacgaccggtcgctcgacgaggcgatggtgcttgaggatggcgacgtgacgctggtgccgaaggggtatcacccctgcgctgccacccacggctacgatctctactatctgaacgtcatggctggtcccaagcgcgtgtggaaattccacaatgcggcggagcatgaatggctgctcaaggcgtgagccggaagacatgacgattgaaagccgcgccacgacagcgcggcttttgcttcaattgcgcgacatcagatatcgagcacgagctgcggcaggccgttcgaggtcttgcgtggcgaaacgccgttttcgtcgacctgcgcgttaaccctctggcgaaaggccgagaagctctcgaaggtaacgacatcgacgggctcgtcgaaatgcagcgtcagcttgtgcaggccgccggattgttcgctaagcgccaggatcttgccggtgaacggctggttgagatagcgaccgctgacccgcgcgccgacggtgagtgccgcaagcggcgcggcattgggtctgcttgccagcgccgatagcgtattccagtcgcggacgccgtgctggctggcgatcagctcgagagcggcgccgtgcgagatcgatttgccgctcgcttccatggcgccacgtaatcgcttggcctgggccttcagatcgtcgatcgaaggatagttcatggttcagcctttcaaaaaggcatgctgttcgaagcagttgggagctcgcattgccaccagtcagcatgcgcaaagggctgtgaccgttcattgcaggagatcttcaccatggattttcatccgcgagcggcgggcgtctcgtaccggtttttggtatgcggcaggcaagttcgtctgtcaacatgagtaattttctggcaaaccgaccgaatattgcccaaaaatgggacttatccgctccgcattccgcataagcttctagttttaaagatctttttcagaactatcgcgcacacttgcgctagattgaaaccagacaaccagcggaggcgacagtggcctttcagatgcacctcgatacgacacatcccgagccagaccaggcttaccgcgaattcgcgcttgaccgtcctggcaaggtcattttcgtcggccatcacctcagcaccgcgacgcaactgcgctgcctgatccgcagcatcacgctcgccggcgcgacgatcgaggtgaattcgtcgatcgaaatgccgaacaatttcttcctggaaatcctcggcattcaggatgaaatcggttcgaccctggtcaagcgcgagggggatctcgccacgatcagcttcaacatgctgatcaatccggagttcctgcatcacgtcttgcgcctgagcttcgaaaactaggagcgacacacacgtggagaaagagcgggctcgcgcccgctccggctttcgacgcggtcgtcaagccgccagtcgccgctcgatctggtcgatcggcatattcgtgtagtccttgggaatttctgccgatatgatggcctgagcctcgacactcatgttggcgcgaagcgttccgagcgcccttggcggcgcaaccagcacgatattggtcgcatcgttttcaatgatcagatcatccagcttgaaggcaatccgcttcaagaattccgcctcggcctgatcgtgccagctgagttcctcgacagcgctgccactcgtgccatcggcgccatgtgcccgaccgggcttgtcggtgccgatttcgcgatcgggctcgttcggttgcgccagtgtttccctgaccttgaggtcgacgccggtgacgtcgccgtcattctgcatgatcagagccttgcctccgtcgcataccacaacccaggaatttcgcggcactctgatgtcagccatatcagtctccttgatgttttctcctgagcgcggaacccccgcgcccgtgagcacagatccgtacttgtgaacacaaggcaaacgtacggggtcgtaaagagttcaacgatttgtggaattcacgcgaggggcaatccaatccgtgtagacgacgtacagagaggcaaacatcagggacatgatcatgaaaacagctctcgtcgcctatgccggttcactgggtaccctgctcgtgctcgatgccatatggcttggcatcgttgcccgtacattctatcgcgaccagctgggcgacctcatgttgccgtcgccgaacctcggaatcgctgcgatcttctatctgttcttcgccgtcgccgtggtggtgctggcggtctatcccgcgatcacgtccggctccgcctggaccgccgtcatctacggcctgattctggggctggcagcctacggaacctacgacgtgacgaacctcgccacactgaagaactggccgccgctgatgagcatcgtcgacctcgtctggggcggcttcatcaccgcgatgacggctgccggcggattttttgccgtccgcgccctcagttaaattctcattcattagaattgtagtggcttcgttgatgattgcgcaaagcattcatgtgacgctccgttggaaagactaggatttttctgatttttgggagtgtgcctgcgatgtcgatgctcaactacacacacctcacgacggtgaaatcggaaatctacgagacccggtgggagcagttcaatgtgcgccgtccggcccgtatcgtggctgtgcgcccctgcctgacgggtatttccgtgcgcagcggcgagatcatcgacatctcgcgcggcggcgccacgcttctcgtctcgtcggcgaccggccttcccaagcactactatctcaacattctcgggcttgcctaccgcatcggctgcgccgaggtttcccggcgcaacgagcgcctgcatgtgcgcttcatcaatacgatcgaacccgacgtgctgcgccgcgtcgtccgcgccgacttcatgatcggcaacatggaagcgatcagcgcgagccgcacgatcagcatgtagtcgggcttttcgcggaataatcgtccttgccttggcttcgtcagcgcctattgttggcgcgattttcatagccttgggaaatgccctcgaatgtctgccttctcgcgcttcacaccgcttgtcagcgccctgccctccaccgttccctttgtcggccctgaggccatcgagcgccagcgcggcctgaccgtcaaggcaaggattggcgccaacgaaaacggctttggccccgctccatcggtgctggcggcgatgcgcgacgcgggcggcgatatctggaaatacagcgatcccgagaatcatgagctgaaacaagcacttgccgcccatctcggcaccagcgccgccaacatcgcgatcggcggcggcatcgacgagcttctcgggcagatcgttcgcatggtgatcgaacccggcgcgcccgtcgtcacgtcgctcggcggctatccgaccttcaacttccatgtggcgggcttcggcggccggctggtcaccgttccctatgtgaatgatcacgaagacctggacggattgctggatgcggtgaagcgcgaaaatccgccgttggtctacttcgccaaccccgacaacccgatgggcagctggtgggatgccgaccgcgtggtggcctttgcccgcgccattcccgagacaacgctgcttgtcctcgacgaggcctatagcgaaactggcccggcgagcgcgctgccgtcgatcgcctccctgatcgatctgcccaacgtgatcaggacacgcaccttctcgaaggcctacggccttgccggcgcccgcgtcggctacgcgatctcgacacccgggacggcactcgccttcgacaagatccgcaaccatttcggcatgaaccggatggccgttgccggtgcgatcgccgcgctgaaggatcagaaccatctcctggaggtcgtcgcgaagatccatgccgcgcgggagcggattgccggcatcgccgatgccaatggtctgcgggcgctgccgtcggccaccaatttcgtcgccatcgacgccggtcgtgacggcacccatgcgcgggcgatcgtcgatgggctgatgcagcacggcgtgttcatccgcatgccgggggtggctccgctcaaccgctgcattcgcgtcagcgtcggtccggccgccgatatggacctgttcgaggcggcgttgcctgaagtcctgaaatcgatcggctgaagcaacgacaagaaccgcgccggccttgttccctgccggtcgcggttcgatatcgtggcatggcgctaaattggcgctttgccgttccctcttcgaggttattgttcttgttgaattgttcgcgatgacgatcgcttgcctgtcgcatgtcggtgccgcaaaaccgctgcacctttttgcgcgacatgcatcaatgcaccgtcatccattcgcgggcggcgcgcagcgcctcgacaagctgcatcttgtccatggtggcggcgacatcggcacgcagttcggcggcgcgatcgtggcccttgatggcggcgatgttcagccacttgtgggccgcaacgaggtcaacggagcatccgcgacctgtcgcgtacatcagacccatttcgcagaagacatcggcgttgttttcgccacccatggtggccatttcagcattgtgcatttcaaagcgtgccatcggttttatccctgtttagcctgttatcgacttaccctgtttttacctcggagccttgccgtctaacgcggcgttcggtctcttcggttcggcgggtttgccccgctcgtttgatggctccactatgccaaacgggcttcaaaaaacgcctaaaatgcatgattaatttgagacaaacaaagtgcaaacgcttggtaaaattgggtttttgttaaacatcggatcgcctgctcattaaggattccggcgtttgcttaagagaaaattcagatttgaaaatcaacccttcattcaccatgaaatcagcggcaaaatgaaaacacacgccaattcacagccgcaaacgcacggttttccaaaggtgggaacgcgaatatttacctttacgttcgcgtaagatatcgtccacaacctcaggacatcagggaggaacaagatgatccgcagtctcattctggcgagcgcgctggcgctttccgcgacgcttgcctatgccgaggagcccatagcaggcaactggaagacggtggcgggcgacacggcggtgatcgcgtcatgcggcggcagctactgcatcacactgaagacgggcaagtatgccgggcgcaagatcggcacgctgtcgggcaaggacggcacctacaatggtgagatcaccgacccgagcaacgacaagacctatagtggttcgggcacggtttccggcaactcgctgaagatgaagggctgcgtactggccgtgctctgcaagtcgcagacctggacacgcctgtaggacggtacccgatgcgcccgcgccaccgggcgcatctcccgcgtcctttccggtccggcacgtttcagggccggcttcatgaacggcggatgaacctcgatctcagcatcggttcagcctgaccatggcaaaacggtgtcattcaaaagcgcactgcgtcgcaatcggcacgaagcgcacagatgacattcgggacatggcccatgggcaaggatacggacgtgcttatcatggcaagacgcttcaccatcatcacgctgttcgcagcgatcttcgccttctcgttctccgccgccgtcacccacaacgccggtagcggcgcgcagtcgcatttcggtgcgaactacacctgcgtcgacagaaccaacccgatctgcaccagcgtcaactgacgccatcgcggccggcagccaccgattccggttgccggtgatgcaagtcatcgaggtcatgcacgcgtcgtttgcttgttaagaacgacgtactataatgcctcatgagcaaccgaatctctccttctgcccccctcgacgtctcgtctccgagccccttcaagccgcaaagtttcgacgatcccatcaaggccgtcgaagcgctgaccgagctttacgagcgcaacaccaccttcctgatcgagcacttcaaggagctggcgcagggcgcgccgatcacctcgcgctaccgggcgttttatccgcaagtgagcatcgagacgaccagcttcggacatatcgacacgcgcctctcctatggccacgtcacggcccccggcatctacacgacgacgatcacccggccatcgctcttccggcactacctgaaggaacagctcgggcacctgatgcgcaatcacaatgtgcccgtcgtcgtttccgaatcgaccacgccgatcccgctgcatttcgcctttggcgaaggggcccatgtcgaggcttcggcgtcggccttcgtcgacgtgccgatgcgtgacctgttcgacacgcccgacctcaacaccaccgacgacgagatcgccaacggcgagtatatcccgccgccgggcgagccctcgcctcttgcgccgttcacggcgcagcgcatcgactattcgctggcgcggctgtcgcactacacggccaccggcgcgcagcacttccagaacttcgtgctgttcacgaactaccagttctacatagacgaattctgcgcctgggcgcgcaagctgatggccgatggcggcgatggctatacctgcttcgtcgagcccggcaacatcgtcacccatgccggctccagcacgccggaaacggacgcgacactctcgcggctgccgcagatgccggcctatcatttgaagaagaaggggcacgccgggatcaccatgatcaatatcggcgtcggcccgtccaacgccaagacgatcaccgaccacgtggcggtactgcgtccgcatgcgtggctgatgctcggccattgcgccggcctgcgcaacagccagcgattgggcgactacgtgctggcgcatgcctatatgcgcgaggaccacgttctcgacgacgacctgcctgtgtgggtgccgatcccggcgctggccgaagtgcaggtggcgctggaggcagccgtcgccgagatcaccggctacgaaggcttcgagctcaagcgcatcatgcgcaccggtaccgtcggcacgatcgacaaccgcaactgggaactgcgcgaccagcgcgggccggtgaagcggctgtcacaggcgcgcgccatcgcactcgacatggaatcggcgacgatcgccgccaatggcttccgcttcagggtgccttacggcacgctgctgtgcgtgtccgacaagccgctgcatggcgaattgaagctgccggggatggcgacggcgttttatcgcacgcaggtcaaccagcatctgcagatcggtatccgcgccgtgcagaagcttgcggccatgccgccggaaacgctgcattcgcgcaaactcagaagcttcttcgagacggccttccaataggccgcctcgcttgcctcacgaagcgcggcgacgaccgaacggcagggagatcgccgttcccgtgagggcggacacgatgatcagcagatgggcattgatgcttgcgcgggcgagcgccgcgagatccgcggcgtcgctcgatgcgccgaaggcaacggcgcccgccgtgatgcccgccggataggtgccgacaccacctggcgcatgcataggcagcaccgacgacagctcaccgccaagcgcgccgccgaagctcgcggcggcgggcacgacgcccatcagccgcagcgcccaggcaagcaccagcaccttcaccagccagttgatgacggtcatgccccaggcgcgcgcgaaggcaggcgcgttcgcgggcaacccgttttcgatctcggcgacgaggtgttgcagtttcaacggcaggagtttcgccgcaagccgaacgagcggcttgcgcgccgcaaacgctaccaccggcatcagcagaaaagcagcccagagaagccatgccaataccttgtccgacgaagcgatggcgaagccgatgcccgcggcggcgaagagcgcatgaagatcgagaagacgcatgacaagcagcgccgccgtgccgcgcgccagagggatgccgaattcggtgcgcatcagaagcggaaagctggtctcgccggttcgaaacggcagcatgatgttcaagaggttatgcacttgcgtgacgcgaaagagggccgggaaccggccgcgcgtctcacgcgggaagtaatcatagatgcgccaggtgcgcaggaagtaagtgctggtgagcagcgccagcgccaccacgatcgtcggcgccccgacctccgcccactgccgcaggatggtcgaccagccccagaaccattcgatgaagatcgcataggccgcgatgatcaaaactgtcagcagcagcattcgattgcgtacgaaccaggattgtcggctggcaaccaccggagacttcatgtactagcttcctgccttcggccgacagaagagcggcaccactgggcggcgttttaggagaaatacgtgttgcagacaacggcagaaacactttcgggcgcgatcgacgccgctgctccggtcgaactatcgctggtcgtccccgtcttcaacgaagaagaaagcgtcggcccgctggtcgaccgcatctgctcggcaatgacgcggtatcccgaccgctgggagctcatcctggtggacgacggcagcaccgacgccacgctcgtcaacgcccgcaagcatatcggccgcgatggcctggagcttcgcgtcgtggcgctgcaacgcaatttcggccagaccgcagccatgcaggccggcatcgacacggccacgggccgcctgatcgccaccatggacggcgaccttcagaacgatcccaacgacattccgcacatggtctccgaactcgagcgccgcgagctcgacttgctcgtcggctggcgcaagaaccgccaggacgggctgcttttgcgcaagatcccctcctggtgcgcgaattatctcatcggccgcatcaccggcgtcaagctgcacgactacggctgcagcctcaagatctaccgcacttcggtcatcaagcaggtaaagctgatgggcgagatgcaccgcttcattccggcatgggtcgccggcgtcgtgccgagctcgcgcatcggcgagatggcggtcacgcaccatgcgcgcgcgcacggccagtcgaaatacggcatctcgcgcacattccgcgtgatcctcgacctgctgtcggtcatgttcttcatgcgctacaaggcgcggccggggcatttcttcggctcgctcggtctcggcctcggcgccttgtccgcgttgatcctgatctatctcttcttcgacaagttcatcctgggcaacgatatcggcgcccgaccgatgctcatggtcggtgtcgttcttcttctgtcctcggtgcagatgatcacgacggggattctggccgaaatgatcgcgcggacctactatcgcgacgacgtttcgccgaactacatcgtccagcgcatcttcgacgggaacgagaatgcgtaacctcctggcgcggaagccggatgccgtcatctggcttatcgccgggtatttttgcctgcaattcgccgttcgcctgatactgccgcacggcctcagattcgacgaggcgcagcaggcattcgtttcgcaatggctgacgctcggctacgattcgcagccgccgctctataactggctgcagtcggtcgtcgtctggtgcttcggcctgtcgctggcgaccatctccgcgaccaagaacctggtgcttttcctcgtctacctgacctactacaagctcgcccgcgagttgctcgaagacaagctctacgcggtgatcgcgacactctcgctgctgacgatcccgcaactgtcctgggaggcgcaacgcgacctcactcacaccgtcatacagcttctaaccatcaacctctttctctacggcgtgatcaagactttgaaatcgccgtcgctcggctcctatgctttcatggggctcgcactcgggctggggatgctgtcgaagtataatttcacgctcctcgccgtggccgccatgcccgccgtatggctgcatccgcaaggacgcgcgcggatcatggatcggcgcttcctgctgtcgatcgcgctcgccgtgctgatctttcttccacacgccctctggctgctcaacaatctagacatcgcgtccggccgtacgctcgggatcatgaagcaggaggctccggatggcgcgttcgcgaagctggtgcacggaccgttcaagttcctccgcctgatcgtcatcatcatggcgcccaccgctatcatctatgcgatcgtcttcggccgctcattctggcaaagcggtcgcgcagtgacggtatggacccgctttttcggcgtgctgttcatcacgatcgcgctgctgataatggtcctgatcctcacgatcggcatgacctcgctgcgggatcggtggttactgcccttcctgttcctcatgccgatctatttctgcttgaaaatgcaggccgccgggcagcggccggacagtcatttgcgacgtttcctcgtcgtgccgctggtgctgatgatcgccattccggcggcgctgctcgtcaggccgaacctgcccaccttgttcaaggggtacgaggcctacaacgtcccctatagcagctttgccgcaaaggtatcggccgaagagaacaagacacccggcctagtcgtcaccgacggctggctgcaggctggaaatctccatctgcaatggccgcaggtgccgcttatgtcgcgattcttcgacaacatgaagatcgactatgagtggacggccgacaggccgatactgttggcgtggagcaccgaggacagcggagcggcactgccccccttgctggccgaatggatcgcgcagaaccttggcgagcaataccgctcggtcgacgtgaaaagcacctccattccctatcaccggggacggccggaggatcaggtcggcttcagctatgtctggatctacccgaagtaaccctgctcaagccttcagttccttccacgccgcgtccagggcgagcttggcgatgcgccccatctcgtcgacctcgtcacggctgatgatgagcggcggggatgcgagcatgcggtcgccagtggcgcgcaggatcagcccattggcgagcgcatgattgcgcacgagggtgccaacggcgtcgggcttttcataacgggtgcgggtttccttgtcggcggtgagctgcaacgccgccatcaggccgacgctttgggcttcaccgacgaggtcgtgatctccgagcgcgctccagacctttgcgaagtaagggccgatatcgtcgcggacgcgctcgatcagccgctcgtcctcgatgatcctcacgttctccagagcagcggcggcacagacggggtggccggaataggtgaagccgtgattgaaatcgccgacctcgttgatcagcacatccgcgacccggtcgctgaccagcacgccgccgatcggcagatagcctgaagacaggcccttggcgatcggcgccagatccggctcgacgccgaaatactgatggccgaaccattcgccgagacggccgaaaccgcagatcacctcatcggcaacgagcaggatgttgcgcgccctgcagatgcgggcgatctcaggccagtaggtttccggcgggatgatcacgccccccgcgccctgcaccggctcggccacgaaggcggcgacgttgtcctcgccgagttcgtcgatcttcgcttcaagctcacgtgccaccttgaggccgaattcggcgggagaaagatctccgccttcgccataccagtagggctgcccgatatggacgatgccggcgatcggcaggtcgccctgctcgtgcatgtatttcatgccgccgaggctggcgccagcgacggtcgagccgtgatagccgttcttgcgggagatcacgatcttcttcgacggcttgccgatggcgctccagtaaacgcgcgccatgcggaaccatgtgtcgttggcctcggaaccggaaccggtgaagaagacatggttgaagcgtgggccggcatgggcggtgatcttttcggcaagcaacgtcgtcggcgtcgtcgtggtgccgaagaaggtgttgtaatagggcagctcgttcatctgccgcgccaccgcctcggtgatttccttgcggccatagccgacgttgacgcaccaaagcccggcgaaaccatcgagatatttgcggccgtgactgtcccagacgtgcacgccttcgccgcgctgtatgatgcgcgtgccatccgcattcagcttcttcatgtcggagaatggatgcagatgatgagcggcatcgatggcggcgagattggagcgcgcgtaagtatcagacatgatttgctaaacaccctcggatattgaaagcctcttcccaatgagctacgaccttggccttgtccgaggggattttcaagatcatggcgagcgacaacatgcacggcaaagctgcggatggcgatccgcgcatcgaaatcctcctggtcggcatgaatggcgacctgcgcggcaagcagatcccgctggacgcgcagaagaaggtatgggccggcgaggtccgcctgccctcctccacccagtcgctggacatctggggttacgacaacgatgagatcaccggcctctcgatgacaatcggcgatcccgacggccaatgcattcccgacaggcgcagcctgacgcccatgccatgggctcccgagggctcggtccaggtgctcgcgaccatgcatgagttcgacggcacgccgagcttcatggatccccgcgccatcctgcaatcggtgcttgaccgctacgccgcgcgcggactgaccccggttgtcgccaccgaactcgaattctacgtggtggcgcccgactggagggagaccggccggccgacgccgccggcaagcctcacctatcagggcgatcccaacggcttccagctctacgacatgagcgccgtcgacgcgctcgacgattacctgcagacggtgcgcgcctatgcgaaagcgcagggactgccggcggatgcgacgacggcggagttcgggcctggccagttcgagatcaaccttttgcaccgcgccgacgcgctggcggccgccgacgactgcatctacctgaagcggatcgtcgaacaggcggcgcgaaagcacgggttgaaatccacctgcatggccaaaccctattcggaccacgccggctccggcctgcatgtacatgcgagcatcgtcgaccgggagggccgcaacatcctcgacgccaatggtggcgaggcgacgaagctgaaatcggtctgcgcgggaatgctgcagagcatgcgcgatgcgcagcttgtgttcgcgcccttcgccaactcctatcgccgcttccagcccggctccttcgcgcccgtggacctcacctggggttatgggcatcgcggcacggcgatccgtattcccgacaggaacgggccggcggcccgcatcgaacaccgcgtcgcgggcgccgatgccaatccctacctgctgctggcggccattctgggcggcatgctgctggggctcgacaacgagctcgaccccggcgaagagacgacgccgtcgcacgtgcccgaaaacaccaccaagctgacgcatgacttcctgacggcggtcgagacgtttcgggcgtcgccgttcatcgcggatgtcttcggcgaggcctaccagaagctctacggcgacacgaagcggaaggaggcgatcacgcacctccgtaccgtttccgacttcgactaccgcacctatctgccgcggctttaaggcgtcggttcgcgacgttcggcttcgttgacctgggcggcgaggccctgcctgacgagcaccttgagttcgccgggatgcagtttcagcgcgacgtcgcgggcaagcggcaacaattcgccgtccatgacgcaattggccttcgaatgcagctttgggaagtgcagatgcacttcggccggatgcatgatcatcacgtcggcgttctcccgcacctttccgcgcaggagatcgacggcgagacgcgccacgccccacggcttcagcggttttgcggtgtagaagccaagttcgcccgatgtcagcgtatcggcgtaaagcagcgcgttctcgccgaagggattgttggacaccgacaccgctgacaccttgcgtcgctccttgatgccgatcgcctcgaactcgacctcgaactccggcggattgagcaccacgcccaaggcagcgcgcgtgctggcacgcatttttccgatcctcgaacggtaggtgtaggaattgcgatagcggaccattcgcgcatgcaggcccgtggagaactggtggatgaaggggcggtcgttggcgctggcgatatcgacgtggtcgacctcgcccgatgccagaacgtcgagcgcctcccagatatcgagcggcacgcgcaacgatcgcgcgaagagattcatggtgccggcggggatgacgccgagcgcgacgccgttcttccacgcgatggacgaggccgccgatatggtgccgtcgccgccgccggcgacgatgccgtcgatgtcgtcacggcgagcagcgcgctccatggccgggacgatctccttgcccggaaacacctccgcctcgaaatcatggccggcttcacggaaaacccgttccgcatgtttctcgtacgcttccatgtcggtggtgcgaaacgtgccgccatcgcggttgaaaaaacctataagcttcatcgggctcccattgtccatcggctgacgcgctgcttagacatggttgccgtccgtgctatttcaagcagatggcgcgtcaaatgacgtcgcaatgcaacgccctgaaccaatatgccgcacgtatgcgcgtggcgggatgctgcgctgcgtaaaatgcacatgacgcttatcaacaaatcgtaaattaatgaggtgttggagcgagcgctccatctccctcattttccgcttgttcgtccggcagtgacactgcgttgcgcgaccgttccaagccattgcatgtccgaaggagctcgcgcttgagccaggtcgccgtaaacgattccatcgccgatattcccgtctccgaggcaccatcgcccatggcggtcgcgctggttcagctggcgcttgcctgcggcggcttcgggatcggcaccggcgaattcgcgatcatgggcctgctccccaatgtcgcgggcacgttttccgtcacgataccgcaggcgggctatgtgatcagcgcctacgctctgggcgtcgtgatcggcgctcccgtgatcgccgtgctggccgccaggatggcgcgccgttccctgctcctgctgctgatggggattttcgccctcggcaatatcctgagcgccatggccccgacgttcgagagctttacggtcctgcgcttcatcaccggcctgccgcatggtgcctatttcggagtcgcggcgatcgtcgccgcaacgatggtgccggtgcacaagcgcgcccgcgccgtcggccgcgtcatgctgggcctgacgatcgccaccctgctcggcacgccgcttgccaccttcttcggccagtcgctcgactggcgtgttgccttcaccgccgtcggcgtgatcggcctcgtgaccatggcgctgatctggtactacgtgccgcgcgacacagtctccgagggcgcgagcttcatgcgcgaactcggcgccttcaagcgcccgcaggtgctgctcacgctcgccatcgcggccgtcggctatggcggcatgttcgcgatgttcagctacatcgccgacacgacgaccggtgtcgccatgctgcagcccggcatggtggctgtcatgatggtgctgttcggcgtcggcatgaacgccggcaacgtcgtcggctcctggcttgccgacaagtcgatcatgggaacgatcggcggctcgctgatcttcaacattctcgtgctgatgctgttttcgctgacagcctccaacccgttcatgcttgggctgtgcgtcttcctgatcggctgcggcttcgcggccggcccggcgctgcagacccgcctgatggatgtagccgccgacgcgcagacgcttgcagccgcttccaaccactccgccttcaacatcgccaacgcgctcggcgcctggcttggcggcctcgtcatcgcctggggctacggctcggcttcgaccggctatgtcggcgcgttcctttcggtgctcggtctcatcgtcttcgccgcctcgctacgcctcgatcgccgcagccgcgactgacaatcggcggcgcgcggctttttcgccgcaaccgcctatggcgcttgactttttcagcgtttgggaccacctactgcctcacgcacggaacgcccgttccgagcggatatcaacggagccatctcacgatgccaagcgacagtagtagtcgattgcctttgccgtacgcggccttcgtgcgctgaccgatatcgatcgggctcgcccgtcggacgctgcggcggatcgacggaaaggcgagctatatgaacatcaatcgcttccctctgcgggcaggccatgccgcccgtttctttgccagcgacagcctcggtgccatcaccacggctgaacgcgtcgagcgtcttaacgcgctcgaaattcccgaagcagcggctatcctcgccacgctgccgcagcagaaggccgtccgcatattgggacgcccggagctgcaccatgccgccgcgatgctgaccgaaatgccggtcgagcaggccgcgcggcttttgaacgccaccgccaacgatcgggtcgccgacctgttccaggaaatggacgacgatgcgcgggcgcacctgttttccaagctcgaccgcgcgacctgcctcgccgttcagcacctcatgggctacccgccgcgcacggccggcagcatcatgacgacggaattcgtcagcgtgccggcgacctggacagtcgaaaagacgctggagcatgtccgcaaggtggagcgttcacgcgagaccgtctatgcgatctatgttctcgacgtggagacacaggcgctgaccagcgtcgtgacgctgcgccgcctcatcaacggcgagccgcaggcctcggtgctgagcgtcgcccaacagggcggcatcgtcatcgccgatccgctgatgacgcaggaggacgtggcgcgtctgatccgcaagcacaacctcctggcgctgcctgtcatcggcgaaagcggccacatgctcggcatcgtcaccgtcgacgacgtgatcgacacgatgatcgccgaccagacggaagacgcgcagaagttcggcggcatggaggcgctcggaaagccctatatggcgatcagcttcgccggcatgctgcgcaagcgcgctggctggctctgcgcgctcttcctcggcgaaatgctgacggcgagcgccatgcagtatttcgaaggcgaactggaaaaggcgatcgtgctgacgctgttcgtgccgctgatcatgagctccggcggcaactccggttcacaggcgacgtccctgatcatccgggcgctggcgctcggggagcttaagctgtcggactggtggcgagtgctgctgcgcgaactgccgaccggcatggtgctcggctcgatcctcggcgcggtcggtttctcccgcatcgtgctgtggcagaccatcgggctctatgattatggcgagcactggatccttgtcggtttcaccgtcttctcggcgctgatcggcatcgtgacgttcggctcggtcgccggatcgatgctgccgttcctgatgcaaagactgaggctcgacccggccagcgcctcggcacccttcgtcgccacgctggtcgacgtgacggggctggtgatctacttctcggtggcgctgttgatcctcagcggcacattgctctgaacgcgaaaacggggccggtcggccccgttctcatcttgctcaggcggtttgcgcctggatgacgatgacctgcgcgccgggcagcacccggtcgtagagatcgatgacatcgtggttcagcatgcgaatgcagccgctcgacatggcaagaccgatcgactcaggctggttggtgccgtggacgcggaaacgcgtgtcgttgccgccgcgatagagatagatggcgcgggcgcccagcggattgttcggcccgccaggcatgccgccggcgagcttgcggtaacgctcctcgcggcgctgcatgttttcggtgggtgtccagctcggccattccgccttgcgtccgacataggcgccacccgagaatgccagcccttcccggccgacgccgatgccgtagcgcatcgcctggttgtcgccgagaatgtaatagaggcggcgggccggcgtatcgatgacgatggtgccggggctgtagctggaggcgtaggtgacctgctggcggcgaagctccggatcgatcttgtcgagcggcatggccggcagcggaaacttctcggccggaagggccgcgtaattggcgcgttgatcaggaccgctcgaggcgcagccggcgagaagcgcggagacgcccagaacgaaaccacggcgggaaagcgacatcgaagcagttccttaacgttcggttgatgcgaccgaggttaataagattatggttaatgaaccgctaagcgtgtgccttcgatcacgcattcgttaagaggttgtgaggtgcttctcgcatccgttacgccaagctgcatcatcgtacagagcgaatgcgacaggcgcgacaattcttccaaacgcgcctgcctgatcgcaagggcagcgctcatggctattcctcacatattcggataaaccggcccctcgccgccctgcggcggcacccagttgatgttctggttggggtccttgatgtcgcaggtcttgcagtggacgcagttctgagcgttgatgacgtaggtctcctcgccatccttctccacccactcgtagacaccggcaggacagtagcgcgtcgagggaccggcgaagatgtcgtgctccgacgacttctgcagcgccatgtccctgaccttcagatgcacaggctcgttctcctcgtgattggtgttcgacaggaacaccgaggagagacgatcgaaggtcagaacgccatcgggcttggggtagtcgatcggcttgtgctttgaggccggttccagcgattgggcgtcggtcttgccgtggccgagcgtgccgaagaaggagaagccaaggagctggttggtccacatgtcgagaccgccgagcgccacgccaatggccgtgccgaacctcgaccacagcggcttgacgttgcgcaccttcttcaggtccttgccgatgtcgcttgcgcgccattcgttctcgatctcgatgacctcgtcgttggcgcggcctgccgcaatggcgtctgcgatcctgtcggccgccagcatgcctgacaatacggcgttgtggctgcccttgatgcggggcacgttgacgaagccggccgagcagccgatcagggcgccgcctgggaaggtcagcttcggcaccgactggtagccgccctcggtgatggcgcgcgcgccataggacagacgcttgccgccctcgaaggtggtgcggatcgatggatgcgtcttgaagcgctggaattcctcgaagggatggagataggggttcttgtaattgagatggacgacgaagccgacggccacgaggttgtcttccagatgatagaggaacgagccgccgccggtcttcatgccgagcggccagccgaaggagtgctgcacgaggccctgcctgtggttctccggcttgacctgccagagttccttgatgccgatcccgaatttctggggctggcgatctttttgaaggtcgaactttgatattagctgcttggcaagcgagccgcgcacgccttcaccgatcagcgtatatttgccgagcagttccatgccgcgcgtgaagttcgggccgggttcgccgttcttctcgatgcccatgtcgccggtggcgacaccgatgacggcgccctccccgttgtagagcacctcggttgcggcgaaacccggataaatctcgacgcccaaggcttccgcgtggcccgccagccagcgacagacgttgccgagcgagacgatgtagttgccgtgattgttcatcagcggcggcatggcgaagttcggcaggcggatggaaccggccggaccgagcagcaggaagtgatcgtccttgacctcggtcttgaacgggtgatcggcctcttcacgccagtcaggcagcaggcgatcgatgccgatgggatcgacgacggcacccgacaggatatgcgctccgacctccgcacccttctccagcacgacgacggaaagctcgggattgacctgcttcagccggatcgcagccgaaaggccggcgggaccgccgccgacaatcacgacgtcgaattccatgctttcgcgttcgggcagttcagtcgtttcggtcatccgtcattctccgctcggccggctttgcggccatattccccgtgtatgaggtatctctttgcaaaacacggagggattgtcgagccgggaaacgacagccaataccccatttcgcgcaatgatattcctcttcacagaagaactacatgacgtttacgtcaacgtcaataaatgagccagatcctgccatggacgacctttccttttgatcgtcgcgcgccgtataaacgcagcgagcaacaggagacttcaaaatggatctgggcatcaagggcaaacgcgcgctcgtgctggcatcgtcgcgcgggcttggccacggcatcgcggtcgccttggcgcgcgagggcgccgatgtgcttttgtgcggccgcagcggcgaaacgctggaggcgaactgcaaggcgatcaatgccgagggcaagggcaaggccgactggatctgggccgatctttcggaggagaacttcgtcgagacggcaacggcagccgtcaaaagcaagctcggcggcgtggatatcctgatcaacaataccggcggcccgacgcccggcaccaccgaggacatgacggccgagcggctggagacctatttcttctccatggtcctcagggtcatcacgctcaccaacgcgctgcttcccgacatgaagcaacaaggatggggccgcatcctgacggttgcgtcctcgggcgtgatcgagccgatcggcaatctcgcgctttccaacacgctgcgccctgcgctcgccggctggagcaagacgctggccaccgaaatcggccgcttcggcatcaccaccaacctgctgcttcccggcagcatcctgacgagccggctcgatgatctcgacggcgcggccgccaagcgcacgggcaagagcatcgacgagatccgcgtcgccaaggaagcggccatcccggtcgggcgatacggcaaggtggaggagttcgcggcgaccgccgccttcctgtgcagccagcaggcgagctatatcaccggcagccttgtgcgctgcgatggcggcgccgcgcgatccctctgatcgcaaacgacaatcgggcgccagccaccggcgcccgaccatggttgtgtcacattcacgccatcgtcgatctttttagaacatgagaacattacgaagatttaagccattctaaccacttagtgatgcccttacggggattgtgtctttttcgtgccgcaataaacgtggctgaataggacatactcaacagcccccgaccggtatcaaccatgaagaaactctggatcagcacctgccttatcgccgcagccggcttcggcgcgtggcactacaaggatcgcattccctatctccagcaattcggaccgaaaccgaccgagcaggcctatgccgccgggggcaaacaggccggaagcgatggatcgcaacagggtggcgaccaggagggcaaggggcgcaaaagcggcgggccgacgctggtgaagaccgtggccgccgcaaagacggtgctgccgcgcgacgttacggcatccggctgggccgacgccgacgacaatacgacgatcgccgcgcaggaacaggggctggtgaccgagatcatcgccaccgacggtgccaccgtcaagcaaggcgatctcatcgccaagctcgacagccgaacggcacaggccgcggtcgacaaggacaatgcgatgatcgtgcgggataccgcgacggtcgccgaggccgagacggcgcttacccgcgcctcggagctgttgacgtcgaaagccggaacgcagcagacctatgaccaggcgaaggccgcgcgcgacaccgccgtcgccaccgtccaggcggacaaggcgacgctcgcttccgatcaggtactgctagagcatacggagatcagggcgcccttcgacgggcgcctgggcgacgtcgccgtcagccccggcgccttcgtgacggcgggcgcggcgatcgtcacgatcgcgaaatacgatccgatctacgtgaagttccacctgcaggagcgcgatctcaggcagttgaagcaggcgctcgccgccggtccggttgatgtgaccaccgtgccgccgtcggacaagggcaagccgcgcaccgggcatatcagcttctacgacaacaccgtcgataccgcgtccggcaccatcctcgccaaggcgaagttcgagaatgcatcgggtgcgctgtggcccggccagtcggtcaacatcgtcgtccacttcaacgacaacgaacagcaggtcgtcgtgccgacggtggcggtgagccccggcgccgatggcttctactcgttcgtcgtcaacgacggaaaggtgcgcctggcgcccgtgaccgtcgcccgtgcgaatggcggctatacggcgatctcggcgggccttgccgagggcgaccatgtggtcgttgaaggtcaggcgcagctcatcgacaagcaggcggtgaaggaagaattcgatagcaaggcgatcaacgtcgccgcggccgatcagccgaagacaagcgaaaccatcgtggcgggcgcgcaagaatgataccgaatttctgtatccggcgccccgtcgccaccacgcttctcgccatcggcgccgtgcttgccggcatcgccggctatcagctggtgccggtggcagccctgccgcaggtcgatttcccgacgatcaacgtctcggcggcactgacaggcgcctcgccgaagacgatggcgacgtcggtcgcgacgcctctcatcaagcagttcgagacgatccccgggatcagcgagatcagcgccaccaactcgctggggaacaccagcatcgtgctgcagttcgatctcaaccgcaatatcgacgcggccgccgccgacgttcaggcggcgatctcgcatgcgacgcggcagctgcccgacaacatgacgacgccgccgagctatagaaagaccaacccggccgacgcacccgtcatgctgctcgccgtgcagagcgatacgatgccgcgcagcaagctcgacgaaatcgcagagaacatcatctcgccatcgctctccaccctgcccggcgtcgccgaggtctcggtattcggggcgcagacctatgccgtgcgtgtcgaggtcgatccgaacaagctgctgaaccgtggtctggggatcgatacggtcaacaaggcgatccaggccgccaatagtcaagttcccgtcggcaccctgcagaacgacagccagagcatgacgatcaacgccgacacgcagcgtaccaacgccgaacagttccgcagcctcgtcatcgccaatcccggcggcgcgccgatccatctcagcgatgtcgccgatgtcgaggacagcgtcgagaaccagaacaccggcagctggtacgacggcaagcagagcatcatcctggcgatccagcgccagccggacgccaacacggtcgccgtggtcgatgcgatcaatgcgaaactgccggcactgcacgccgagataccgggatcggtgacgacgcaggtgatgaacgattcggccaagccgatccgcgacgcgatctcggacgtgaagttcacgctgttcctgacgatcggcctcgtcgttctcgtcatctacctgttcactggccatctgacggcaacgctgatcccgggcctcgccgtgccgctttcgctgatcacgactttcgggatgatgtatgtgctgggctacagcgtcgacaacatctcgctgctcgggctgacgctcgccgtcggcctcgtcgtcgacgacgcgatcgtgatgctggaaaacatcctccggcacgtcgaaggcgggatgccgatgctggaagcggcgatcaagggctcgggcgaggtcagctacacgatcgtctccatgtccgtctcgctgatcgcggtgttcatcccgatccttctgatgggcggcgtggtcggtcgcatattcaacgagttcggcatggtggtggcgatcgccatcgtcgcatcggccgtcgtgtcgctgacggtgacgccgatgctggcctcgcggctcggcagcggccatagccagccacccttcttcatccgctggttcgacgccggcttcgagcggacgctgcgcggctacgaccgcgccgttggctggtgcctggcgcaccgcccggccattctcgggttgtttctcgcctcgatcggcctgacggtctacctgttcatgacgctgccgacgagcttcttcccgaccgaggatatcggccgcctcaacatttccacccgcgcccgccaggacatctcgtacccggcgatgaaggacctgcagaaccaggcggcggcgctcgtcaagcagaacccggcagtcaaccacgtcatgtcgatcgtcggcggcaatgcccgcagcccgctcaacaacggcacgatgttcgtcgaattgaaggacaagaaggaccggccgccgctcgaccagacgctgcgcgaactgcgcgccagcatcagcaagatccccggattgcaggccttcatcacgccgcagcagagcctgcgctttggcgggcggcagaccgccagccaatatcagctggtggtccaggcgctcagcgccgaccagacaaacctgtgggccaacaagatccagcaggcgatgcacggcgatccgcgctttaccgacgtgacatcggacgcacagaacaacgcgctgcaggccgatatcaaggtcgacaccgaaaaggccgccgccttcggcatcaccgacgaccagctgcggacgacgctgcaggaagcgttcggcggatatgcggccgcgcagatccagtcgaccggcgacagttacgacgtgctcgtcgagtacgacaccaacgcgccctgggacgatcagaagcttcaggacatccgcgtggcctcgtcgagcggcgcgctggttccgctgtcgaacttcgccaccgtgcaacgcacgaccgggccggtgacgatcaaccagacggggcagctggtctcgaccacggtatcgttcaacctgcccgccgggcaagcgctcggcgatgcgacggcggccatcgaccagatcaagaaggacatcgacatgccagcggacgtgttcacgtcctatggcggcactgcgcagatcttcgagcaatcgcagggcaatacgccgctcttgatcctggcggcggtgctgacgatctacgtcgttctcggcgtcctctacgagagcttcattcacccgctgacgatcctgtccggcctgccggcggcagccctcggcgcgcttctggcactgaaagtcatgggcttcgacctgtcgatcatcgcgctgatcggccttctgatgctgatcggcatcgtcaagaagaacgcgatcatgatgatcgacgtggcgctggagaacctgcgatccggcaccggcatgacctcgtccgaggccatccacgaagcctgcgtgcggcgtttccggccgatcatgatgacgaccttctgcgcattgctcggggcgctcccgatcgcgctcggctcgggcgcgagttcggagctgcgccagccgctcggcatcgccgtcgtcggcggcctcatcgtcagccaggcgctgacgctgttcatcacgcctgtcatcttcgtcgagatgggaaagctcagcgactggctgctcagcttcgggcgaaagaagaccgaagacctgcacgaggagccaacgcgggccatcgcggcggaatgatgtcacgggcgcccatcggcgcccgtttcattttgcgcttccgcgtcttgaataagacagaccgctgtggcatcacgcgccctcttgaattcgggcgtcccttggcgccccggcggagcgattgctccagtctccagcaacgatcgacattgagaggtgcgagcatggctcaagcgctaggtctggactttggcacgaccaacaccgtacttgccaccgcggacggcaagaccacccattcgatgggcttcaccagctcggccggtgaaagcgacagcatgcgcacggcgctgtccttcatgaaggacggcaagctcggcgcatcggcgctgaaggtcgaggcgggccatgcggcgatccgccagttcatcgacaatcccggtgactgtcgcttcctgcagtcgatcaagacattcgccgccagcgccctcttccagggcacgctgatctacgccaagcgccacagcttcgaggacctgatggaggtgttcatccgccgcctcagcaattacgccggcagcaactggccatccgacgtggcgcgcatcgtcaccggccggccggtgcatttcgccggcgcgagcccagatccggtgctggcgacgcagcgctacaacgaggcgctgtcgcgcttcggctttccggaggtgcactatgtctatgagccggtcgcggccgccttctacttcgcgcagaacctgaaggccgatgcgaccgtgctggtcgccgacttcggcggcggcacgaccgactattcgctgatccgcttcgagaccgtcgccggccagctgaaagccacgccgatcggccattccggcgtcggcatcgccggcgatcacttcgacgcacgcatcatcgacaacgtcgtcgcgcccgaaatcggcaaggggagtcatttcaagagcttcgacaagatccttgaagtgccgaccaactactactccagcttcagccgctggaaccagctgtcgatcttcaagacctcgcgcgaatatgaggatcttaagaagctcgtcaggaccgcactcgaacccgagaagctggaactcttcatcgatctcgtcgaccacgacgaaggctacccgctgtatcaggccgtgtcggccacgaagatggcgctgtcggcggccgatgaagccgaattcaacttctcgccgctcggacgcgccggaaagcgcatggtggcacgcgccgatttcgaaagctggatttccgacgatctcgcgcgcatcgaaggcgcgctcgatgatgtgctccaaaagagcaatacggaagcgagcgcgatcgacaaggtgttcctcaccggcggcacatccttcgttccggcggtgcgtcgcatcttcaccgagcgcttcgacaccgatcgcatcgagaccggcggcgagatgctctcgatcgcgcacggcctggcgctgatcggcgaacgcgacgatatcgcgcaatggacagtgcaataggccgggatgtggcggctgcgcactttcattgaggctctggcttcggtaatgtcgcgcccatgatctccgtccacgacctctctccaggcgaactcgcagcacttctgcatttccatgcggatgccggcgtcgagtggctgctggaggacgaggccgtcgatcgcttcgccgaattcgaggcgatgaaggcggcgcgacgcagcgccgcccctgccccacaggctccggaagcgcgtgaaacggcttcgcgtgcggcgaccgcctccacgcagcgcggcgcggctcagcctgagcgctcggcgcagcgaccacagccagcgatccctgacagcgaagcgatccagcaggcgcgcttcgccgccgaaagcgcgcgttcgctgttggaactgaagaccgcgctcgaggccttcaatggctgcaatctcaagcacagcgcgcgctcgacgatctttgccagcggagatgctgcgagcggtatcatgctgatcggctcggcgcccggcgcggaggacgatcgcgaggggcaacctttcgcagggcgccccggccagttgctggacaagatgctggccgcgatcgggctcgaccgcgccggcatcctcctgacccaggtcattccatggcgcccgccgggcaatcgcgtcgcctcgccggcggagatggacatctgccgtcccttcatcgagcggcagatcgcgcttgccgagccgaaagtgattctcctgctcggcaatttcgcggcgcgggtgtttttcggcgaaggcgacaccattcacggcttgcgcggccagtggcgagaaattgccgcaggcgaccgcgtcgtccccgccatcgccacgctgcatccgcaggatctcttgaccgctccggtcaataagcgcttggcttggaacgatttattggcatttcaggcaaaattgacggaattcaattctgcctcctaaatagccaacgttgacagatttgcgacaagagccatgcgcatggcgcattcctgcctcgtattcctatgccttgtgaaatccattgtgcgctgcaatattagcgttgtgtcttgggaggaatcataaggaaccaaggccatgagcaacactcgtcgtcctacacactgcagatttgaaaccttgagaaccgcaaacagccacggccgtaccacgcagagctactgccgcaccggcttcgccgccaacgagcagatgatcgctcggggcactggcgcaagcggtcgcatcgtgcgcccggccgccatcttcgcggatttccagcagtattgatcgcagggttcggccatccgccgtccctgccgttttccggctattctcatgacgacccgccttatctcacttctttgcaagatcgacaccatcgagcatatccgcgcggccgtatgcgcggcgcaagcctacgatagcgaatcctgacgcggcgccttcgggcgacacgccaagatctactgctttcccgacatctcgcttgccgcgtgaaacgcctggtcgacataggcgaacttgatcgcctgccactggcaatattcctcgacgaacgcgcgcgatatccagagcggcggcttctttttgtcgacgtcccatcccatgaagccgtcctgcgtcgccttggcgaagaggcgctgcagatgggtgcgcgatatcatgaagtcggccgccagtgccctgctgtcgatcgggccgacgacaaagcggtcgggatgcttatcttccggatcgatcctcgacatgagatagtcgacgataagcccgccggcgtcgttccacatgaagagcccaacccgctttggcggctcgcgccaggccggatcgcgcaggcaatcgcgcgcgatgcgcggctgcatcatccgcatccaccctggattcgcgcggaaccgctccgccctgtcgccgtcatcgagaacgtcgagcgccagcaggttggaccagacccagccgaccatcgcctgctgcgcggtctcggccacctcgtagcggcgcggtcgcttgcgctcctcgccgggaacgcaggtaatgaagcgataggtggcgacttcgtcgatgtagctgcggatcgtgttgcggctcgccgccttgaaggcggtaatctcggatgtcagcgccgtggccgtcagccccgacgatgcatcgccgtcaaggcgctccatgctcagcgcataggcgacctgggtcagcagccagcgctggtgcgacgcaagcaggcgcgcaagccttggcccggcatcgaacatatcgcgcatgcggcctgcgtgaaatcgaatacccaaaatgaacctgggatcggctatcaggtctctggcactaaacggcatttatctcccggacggcgctcgacttgcccatgcacaagctcagcaacatgaagccgccacttattttcaacataagagtgtataaataaatgaaaattgctcatgtttacaaagcatgacgggcgctcgcgcgccaccctcaaattccgtgggaacgttcgctcgggatcaaaaatgcatgagttttgcgacacttagccacacaatttcgtgaccacgtcgttacggagaactggcctttcgcgcagccgaccgctcgagttccagctgatgctcgcggtagatgatgaaaatgccggcggcgacgatgacagcggttccgatcagcatgctggtggtcgggatatcgtcgaacacgaagtaggcgagcacactgcccagaacgatggacgagtattcaaacggcgcgacggtcgagacatccgcatggcggtagctttccgtcagaaagatctgtgcaacgccaccgcagaagccggcggcgatgaggtacagttgtggagcgagatcgagcatgtcccagccgaaaggtaccgtgaacagcgagaagaccgaggcggtgatcgagaaatagagcacgatggtcgaggtcttttcttcctcgaccagctttctcacctggatcatggcaaggccgccgagaacggaggcgagcagcaccgtgacagcgccgatcgcctgttccgtctcgacgccgccatcgcgaaacagcgtgagcttcggccaggacacgatcgccacgccgatcaggccgacgaagaccgcgctccagcgatagatgcgcaccgtctcgccgagaagcagcgcggcgaagaccaccgcgatcagcggcatggcatagccaagcgcgatcgcttccggcaacggcagatgcaacaggccgtaaaagccgagtcccatcgagatgattccaagcgtgccgcgcttgagatggccgaccggattggtggtgtagaacgacgttttcagctgcccgcgataggcaaggaaagccacgatcgggaacaatgcgaaaaacgacctgtagaaggtgacttggccgggctggatgccggcgccggcaagcttgatgaaggtctgcatccccagaaacaagacgacggaggcgatcttgcatgcgatgcctcgcatcggattttcgaataccggccgcatgtcagaaactcgcgaattcaccaattgaacgtcgggggatcgcatcggattcgatgcctgcccaatgtgccagcggttcgttcgaaagaacaggataaaacgtcggaaaagcgcggtgtgcgtgcggcgtcggccggaaatgtgtcgtttgcccctcggaagtcggggaatttggcgaaaccacccaataataattggcgtcgatccgcgccattaacagtttgagaaccataaactcgcattgattctctattgcacacatagcttttcatagatccacaacttaaacctgtttcaggaggcatgctcatgatgccgtctacgacacccgaacgccagcagccggcggcaacgccgcgctccatgcgggtcgtgacagaggggatcggctccgatctcgaacgcttcagcgccgacaatacacatgtcgtcaagcagatcaggctgctggcgatcaacgcgctcatcgaagcggcgcgggccggcgagaccggcaagggcttcgcggtcgtcgccaacgaggtgcagcgtctcgcccagatcgccagcgagatcgccggcacgttcgagagcaacgttctcggccgcatcggcctttcgcgccgaatggcggatgggctggtcaacgagctcgaaggcgttcggctgaccgaccttgcgcagacgctcgttcagctgatcgttcgcaatcttttcgagcggaccgcggatgtgcgctggtgggcgacggacgctgcgctctggcaaaccttgcaggaaccaggcgcggaaagcgccagcttcgcggccgagcgtctcggcgtcatcaaccgcttctataccgtctatctcgatctcgtgctgaccgacctcaagggccggatcatcgcgtcggccaatcccgatttccaacggcggctcgtcaatatctcgctggccggcgaagcctggtacaagacggcgatcctttgccaatccggcagcgattacgtggtcgacgaagtctgcaacagccaactgcatggcgggcgtacggcgctggtctatgcgacgggcgtgcgtgaaggcggaaaactcgatggaaaactcatcggaacgctcggcgtctacttcgactgggaaaaccagggacaggccatcgtcgacaaggaagccaatctgccgcctcaggtcgtcgaccgtaccacggtgatgatcctcgacggcgccaagaggatcatcgcctgcagcaatccgtcgctgatgttcagccggtttgccctgcaaattcagcatgggcaggagcgcggcagctattacgacaacaacggctccatcgtcgcctatgcgaagacgctcggctacgaggattacgacggattgggctggtatggggtggttgtacaacagaccgaagatgagaccgcgatcaaatcgatcctcaatctgagatagcgaggtcggagctacaatatccccgttctcgcggcaaccaaacacgcatgcgcgaccttcggctttagctttagttcagactttagtgtaattataccaattaaattttaaggcagagcgcccactctgtttgcgaagcattgtctaaaggtctcagggaatatcatgcgcacagataccggccaggtcatcaatctggcagattaccgtcccaccgatttcgtactcgagcgcgtggatctgacgtttgaacttgacccgaccgcaaccaaggtagatgcccgccttatcttccaccgccgcaagggcgccgatcccaaggcgccgctcgttctggacggtgacgaactcgctttgtccggcctgctcttcgaccagaccgaaatgaaggccagccaatatacggcgacaccagacagcctgacgatccgcaacctgccgaaatccaagccgttcgaactgacgatcaccacgatcatcaatccggaggccaacaccaagctgatgggcctttatcgcaccaacggcgtctactgcacccagtgcgaggccgagggcttccgccgcatcacctatttccccgatcgtcccgatgtgctcgcgccctacacgatcaccatcatcggcgacaaggccgccaacccggtcatgctgtccaacggcaacttcctcggcggcgccggctatgacgagggccgggccttcgccgcctggttcgatccgcatccgaagccgagctatctcttcgcgctggtcgccggcgatctcggtgtcgtcgaagacacgttcgtcaccacgtcggaacgcgaggtcacgctgaagatatacgtcgagcacggcaaggaagcgcgcgcggcctacgccatggatgcgctgaagcgctcgatgaagtgggacgaggagcggttcggccgcgaatacgatctcgacatcttcatgatcgtcgccgtgtccgacttcaacatgggcgccatggagaacaagggtctcaacgtcttcaatgacaaatacgtgctggccgatccggagaccgcgaccgatcaggactacgccaacatcgaagcgatcatcgcccacgaatacttccacaactggaccggcaaccgcatcacctgccgcgactggttccagctctgcctcaaggaaggcctgacagtctatcgcgaccacgaattctcggccgacatgcgctcgcgcccggtcaagcgcatcgccgaggtgcgccacctgaaatccgagcagttccccgaggatggcggcccgctggcgcatccggtgcgcccgaccacctatcgcgaaatcaacaacttctacacgacgacggtctacgagaagggcagcgaagtcacgcgcatgatcgcgacgctgctcggcaaggacctgttcaagaagggcatggatctctatttcgaccggcatgatggccaggccgtgacgatcgaggatttcgtcaagtccttcgaggatgtgagcggacgcgacctgacgcagttctcgctctggtatcaccaggcaggcacaccgctcgtcaccgcctcaggcgcctatgacgccgccgccaagagcttcacgctcgcgctcgagcagatggttcctgcgacgcccggccagaccgacaagaagccgatgcacattccgctcagcatcgcgctcttcgccgaagacggcacgccgctcgaaccgtcctcggtcgatggcgccgagtatggcgacaacgtgctgcatctgacggagcgcagccagaaagccaccttcaagggcatcggctcgcggccgatcgtctctatcaaccgcagcttctcggccccgatcaacctgcatttcgatcagtcgcccgcggatctggcgctgcttgcccgcttcgagaccgatcacttcgcgcgctggcaggcgctgacggacctcgcattgccgacgctgcttgcagccgcccgcgatgcgcgtgacggcaagccggtcgtcgcttccaaggacttcgtcgaggcgctgcttgcggcagcggcggacgaaacgctggagccggccttccgcgcccaggcgctggcgcttccgagcgaatccgacatcgcccgcgaactcggcggcaacaacgaccccgacgccatccacgccggccgctccgccgtgcttcagcaggtcgccgacgcaggcaagagcgtcttcgcggcactctacgacagcatgaccacgcccggcgatttcagcccggacgccaggagcgctggccgccgtgcgctccgcaacagcgcgctcacctatctgtcctacgccgagaacgtgcctgatcgggcaaaggcggccttcgatgccgccaacaacatgaccgacctcatgcaggcgctgacgatcctcgcgcaccgcttccccgacagcagcgaggcagccgcggcgctgtccacgttccatgaccgctttgccggaaacgcgctcgtcatcgacaaatggttctcggtgcaggcgaccattccgggtgcgaaggcgctcgagcgggtgctgaagctgatggacaatccgcagttcaagcgcagcaatcccaaccgggtgcgcgcgctggtcggcacattcgccttcggcaaccccaccggcttcggacgcgcggatggagagggctaccgcttcctcgctcgcgagatcctcgatatcgacacacgcaacccgcagttggcggcgcgcatcctcacctccatgcgctcctggcgctcgctcgagcccgcgcgcgccgaacatgcacgcaaggcactgaccgcgatcgccgaagcgccggcactgtcgaccgatgttcgcgacatcgtcgagcgcaccctcaaggggtgatttgcaacgcgaggcggccgagccggtcgaagccgcctccgatgaaccttggaaaaatcagcacttagaatcggttaacagatttttaccttttcctctggacaaggcgaatcaccagtgattcattgagtcaggttcgggcgagcggcgcagcgaatcacgagggatcaaggctgaaaaatgatgaacgtgcggcgggcaaccgtggccgagggacggctgcgtgtcgatttcgaaagcttccgcgcctggcgtgagagcttcaccggcaaggctaccgtcacctcgcgcccctcctcctcttcccgaagctacacgcatgccgagtccgtgttgaaacgcgccatccccatcctgatcgtcgcattcctggctgtcgtcgcggcctcgtatttcttcggaatgctctccgagcacgaccgcatgcaggccgcggcccgtcactccacgacgctcgccgccgcgacggccgccgccgccttcgcggattcggccgccatcttcgacagcggcgacgcggccgagggccaggcgcgccttgcccgcttcctgccgcaggaccgcctcggcgacgacgccttcgttcttcttgtgcagtcgagcggcaaggtcttcgcggcttccgccgccggcgctgcctatgtcggcgccgggatcggcgacttcttctccgaagtgtccgcgatccgccgcttcggcgaccgggcgggcgtcatcgagacgaccatcgccggccagccgcattacgcgcagattacgctcatcggcgacagcggcggctatgtggtcgcggcaacgtcgctcgatcgcgtcagcaagctgtggcgcgaggagctgacgctcaacgtcaccctgttcgccggcatttcctcgatcctgctggtcattctctacgcctactacatgcaggttcggcgcgcccgccatgccgacgagatcttcgtcgaatccaacctgcgcgtcgaaacggcgctgtcgcgcggccgctgcggcctgtgggatttcgatttcgatcgtcgcgaattcttctggtcgcgctcgatgtaccagatgctcggccttccgggtggcgacggcaacatgtgcttcggcgacgcggcccggctgatgcaccccgacgacagcggtatctacgagatcgcccgttcggtcgcccggggcgacgcggagcagatcgaccagatcttccgcatgcgccatgccgccggccattacgtctggatgcgcgctcgcgcgcaggtcatccgcaccaatgccggcaatgtccacatgatcggcatcgccatggacgtgaccgaacagcaccgtctcgcgcagcgctacgcggaagccgaccagcggctggcggacgcgatcgaaagcacctccgaagccttcgtgctgtgggacaagaacgaccggctggtcatgtgcaacacccacttccagcaggcctatggccttcccgacaacgtgctggtgcccggcacggagcgcgccgctgtcaacgccgccgccgcccgccccgtcatcgagcgccggatcgccgacgcccatggcagcggctactcgcgcaccagcgaagtgcagctcgccgacgagcgctggctgcagatcaacgagcggcgcacccgcgacggcggcatggtttccgtcggcaccgacatcacgcttctgaagcgcaaccaggagcgcctgcgcgattccgagcgccgcctgatggcgacgatcggcgacctctcctcctcccgccagtcgctggaaagccagaagtcggcgctgtctttggcaaacgccaactaccttgcggagaaggaacgggcggaggccgccaacaaggcgaaatccgagttcctcgccaacatgtctcacgaactgcgcacgccgctcaacgccatcctcggcttctccgagatcctgcaggacgagatgttcggtccgctcggctcggccaagtacgacgagtatgcccgcgacatccaccacagcggccggcacctgctcaacgtcatcaacgacattctcgacatgtcgaaaatcgaagcgggccacatgaagcttcagtgcgagacgatcgacctcgcgccgctgatcgaggaaagccttcgcttcaccgcgatcccggcacgcgaaaagcggatcgagatccagcagcgcatctgcgatggcatgacgctgacggccgatcgccgggcggtgaagcagatcctgctcaacctgctgtccaacgccgtgaagttcaccgacgaaggcggccggatcgcggtgcgcacgcggcgcacctcgggcggcgtgatgctgacgatcgccgataccggcatcggcatcccgaccaccgcgctcagcaagatcggccagcccttcgaacaggtccagaaccagtacgccaagagcaagggcggctccggacttggcctcgccatctcccgctcgctgacgacgctgcacggcgggcgcatgaagatacgttcgcgcgaggcgatcggcacggtgatttcgctgctgatccccgacagcgccgcttaatttttgacgaccgactggaagaccttccgcaccgtccttgacagctgcttcatctctccctcgagcgtcttgatgtcggggcaatccccggcccggcagacgagatcgatgagacccgccggagcgtccttggggtcgaatgggccatcgatgcagaggcggatgagctgcgagagctcggtgtagagcgcgaaggccttgatgcagctatcgagatcggccgccgccatcaacggcgcgcccagttctctcagcgcttcgccggtgctgaccccattgaccttgaccgcgacatccttcgccggcgcgatcagcgccagatattgcgcgatgaactcgatatccacgacaccgccggggacgagcttcaggtcccacatgttggccggcggcttttcctgttcgatgagcgcgcgcatctcggccacatccttcgccaccttcttcacgtcccgccgcatcgacagcacttccacgatcacgcgctcgacgtcatcgatcaggctggcatcgccgcagatcagccgcgcacggctgagcgccatatgctcccaggtccaggcctcctcgcgttggtatttcgcgaacgagccgacgcgggtggcgaccggtcccttgttgcccgaggggcgcaggcgcatgtcgacctcgtagagcacgccctcggccgtcggcgccgacagggcggcgatcagccgctgggtgatgcgggtgaagtagcgaaccgcgtccagcggcttggcgccatcggattcctcggccgcatcgtcgtagtcgtaaagcaggatgaggtcgatgtcggagcccgccgtcagttcgaagctcccgagcttacccattccggcgacggcgacgcggccgccggggaacttgccgtgcgccgcctcgatttccgagagcaccgcattcagcgccgcctcgacgatgagatcggccaggtgcgtgaaggcgcggccggccatcgcgccgttgatcgagcccgtcagcaggcgaatgccgatcaggaagcgctgctcggcggcgaagatgcgcagtcggtccagcacctcctcgtagtagcgcgcctgctgcagcgagcccttgagccgtcccgccagatagtcccgcgtcggaagctcggccatcaggccgggatcgagcatgccgtcgaagacgtgcggcctggcggcgatgacttcggcgagcttcggcgccgccgacatgatgtagacgatcagcgacagcagcgccggattgctgccgagcagcgagaagagctggatgcccgcgggcagccccgagatgaagctgtcgaaccgcaggatcgcctcgtcggcgcgcttgctttcgccgaagacgcgcaacagttccggcgtcagttccgtcagccgttcgcgcgcctcgacggactgcgtcgccttgtagcgcccgtagtgccaggtgcggatgacgcgcgagatgtcggagggccgttcgaagccgagcttgcgcagggtgaccagcgtgtcgggatcatcgttctggccggtaaagacgaggttgcccgtctccgtcgacagcctggtctcctgctcgaacagccgggcataacggcgctcgacggtcttgaagacctcgacaaggcgctcggagaaactcggcgtgtcgctgaaacccatcatataggcgatgcgcttcaattcaccctcggtctcgggcagcaggtgggtctgctcgtcgcggaccatctggatgcgatgctcgacgtcgcgcaggaaccagtaggcttccgtcagctcctcgcgggtctcctcgtcgatccacttggccttggtgagctcgtgaagcgtttcctcggtggcgcgcgagcgcagcgccggcatgcgtccgccggcgatcagctgctgcgtctgggcgaagaactcgatctcgcggataccgccgcgaccgagcttgacgttgtgccccttgacggtgatcgccccatggcccttgtgcgcgtggatctgccgcttgatcgagtggatgtccgagatcgccgcgtagtcgagatacttgcggaagacgaagggggtgagatcgcgcaggaagcggtcgccggccgcgatatcgcccgcaatcgggcgggccttgatgaaggcggcgcgctcccagttctgccccctgccctcgtaatagaccatggcggcatcgatcgacaccgcaagcggcgtcgcgccggggtccgggcgcagccttagatcggtcctgaagacgtatccgtcgcccgtccgctcctgcatgatgcggacgagccgccgcatcagccgcgggaagatatcgatcgcatcgtcgggatcggacaggataccggcatgctcgtcgaagaaaaccacgagatcgatgtcggacgaatagttgagctcgcaggcgccgagcttgcccatgccgagcacgacaaggcccgatccctcgctcgggcgcgccacgtttttcagctgcagctttcgggcctcgtgcgaggagagcagcaggtgatcgatcgcggcagagaccgtagcctcggcaagcctgctcagccacgccgtcgtgatgcggccatcgaagacgcgggcaagatcggcgagcgccagcagaaacgccacccggcgcttgaccgtacgcaggcgacccatgacctcgctctcgctcggagacgcgccgtcgcgcggcatccaggcgtcacgcgcctcgaggatcagcgcctccaggcgcggctccagcggctcgcttatcgcaatcgtgaggatgccgggatcgatgttggggatgtcgcgcagatagggcgagagtgtcagcaccgccgggatgaaatcgcggagcgcgccgtcgctcttcagcatatcggccacggcgggttcgtcggcgccgatcttgtgcagatcgtcaagaacgagcttcaattcggtcttgctcaacggcttcaacaggccgtcgatcccctcgctcaggctgtgcgtcgaattcgtcagcatgcgccctccctggcatcaggtggcgaaagtcgaagcagaatcaaagctgcctgcgccacctgaggctaagttagggtctgcgacgcaaatggccaacaggcaaatcggcgcgtcgccggcaacgcctacttcacgggaaagacgagcgtgacggcgaggcctctattggccgtcgcgtccggctcggtgtcggacagttccagcttgccgccatgcagttccatcaccgcttcgacaagcgacagacccaggccggtgccgggcttggagcggctctcgtcaagccgcacgaagcgcttcagcacgtcctcgcgcttgtcggccgggatgccggggccatgatcggcgacctgcaggcagatggcatcgggacggcgcgttagccgcagcgagacctcgccgtccgcgcccgcggaatatttcacggcgttgtcgatcaggttgaagatcgcctggccgatcagttcgcggttgccctgcacctcgatgccgggttcgatatcagtggtcatggcaaggcccgcctcgtcggccaccggctcgtagagttcggcgctgtcggcgacgatggccgagagatcgatcgtcgtcatctcggcggcgacggagcctgcctcgacgcgcgagatcatcagcagcgcgttgaaggtgcggatcagctggtcggattccgaaatgatcccttccagcgccacgcggcgggtatcggcgtcgggtgtatcgatcgcgtcggccgccttgttgcgcagtcgcgtcagcggcgtcttcaggtcgtgggcgatgttgtcggagacctggcgcagtccctcgttcaacttctcgatacggccgagcatcgcattcagcgacacggagagacgatcgaattcgtcgccggagccgccgaccggcaggcgttgcgagagatcgccggccatgatctttttgctcgccgccgacatgcgatcgatgcgcttcagcgcgttgcggccgatgccgaaccagatgatgaccgcgccgaggcccatgatcgccagcgcgaccatcagtgcctgcctgacgagcacgcggaacgcctccggctcgccgaggtcgcggccgatcaggatgcgcaggccattgtcgagcacgttgatgttggcgacggccatgtgcggcttgctctggccggcctccgcgtatcgctggtagcgaaacggcacgctggtccagccctgctcgtcgagtacgcccggctggacggaggcgacgttgccggcaaggatatcgcccgaggggccggcgatgatgtagaggttggcgcccggctgacgggctcggcgctccatggttctcaggagcaggttcatgccgccgttgtcataggcgcgctgaacctgatcgacctcctgctgcacggcctcgcgaatctggttggtcatcagccgctcggacatcgccgtcacgtagaagacgagcgtcgcggcgcagatggcgaagagcaggatgtagagagccgaaaggcggactgccgtggacttgaagagaaccaggaagcggttcatccgtcatccttgatcatgtagccggcgccgcgaatggttttcagcagcggcatgctgaaatccttctcgatcttggaacgcagccgcgacacatgcacgtcgatgacgttggtctgcgggtcgaagtgataatcccagacgttttcgagcagcatggtgcgtgtgaccacctggccggcgttcttcatcagatattcgagcaggcggaattcgcgtggctgcagcggaatgtccttgccgccgcggcgcacttcatgggcgagccgatcgagctcgagatcgccgacgcggtagacgacgtcctgatcgggcgttcccttgcgacggccgagcacctcgacgcgcgccagaagttcgctgaaggcatagggcttcgggagatagtcgtcgccgccggcgcgcaggccggtcacgcggtcgtcgacctggccaagggcggagagaatgagaacgggggtgtggatgcccttgcggcgcagctcggcgatgacggaaaggccatcgcggcgcggcagcatgcggtcgatgacaagcacgtcgtaggtgttttcggtccccatgaagaggccgctttcgccgtcgcttgcgtggtcggcgacgatacccgcctcacgaaaggctttcgtgagataggccgccgcttccagatcgtcttcgatgatgagaatcttcatgcggccgacattacccgccggctgtgtttcggcaaggctcaaagcgtgatcgtcttgctggaaggtcattgtcgtcacccgcggtggtttgacaggaggagccgcgcgctggcgcggctcctcattcagtctgatcgcttagccctggttttccaccggaagggccacgaagcggctgccttccttggactggatctggaacagcgcgcgggtgcggccttccttcttcgcctggttcagcaccttgaccacatcgtcggccgaagagacttcctggttgttgaccgaggtgatcttctcgccttccttgatgcccttgtcggcggcgtcggagttcgggtcgatgccggtgatctgcaggcccttgccgtcgtcggcggggccgaccgacaggccgagatcggcgagcgccttctcggatgccggggtctgtgcttccggcgcctgatcgccgtcgtctgtcgaggcctgctgctgttcggccggcagcgtaccgagttcaaccgtcaccggctgcaccttgcccgagcgccatacagagagctcgaccttcttgccaggggtcatcgcgccgatgcggcggctgaggtcacgggcgtccttgacggtctcgccattgacagcggtgacgacatcgccagccttgaggccggccttttcacccggcgttccggcctgcgccgaaacgaccagcgcgccgcttgcctcggacaggccgagcgaatcggcgatatccttgttgaccggctggatctgcacgccgagataaccgcgcgagacctggccgttcttcatcaggtcggcgacgacgtccttggcggtcgaggcggggatggcgaaggcgatgccgacgctgccgcccgacggcgagaagatggcggtgttgatgccgaccacctcgccgctgaggttgaaggtcgggccgccggagttgccacggttcaccgcggcatcgacctggagatagtcgtcataaggaccggagccgatatcgcggccgcgggccgaaacgatacccgccgtcaccgtaccgccgaggccgaacgggttgccgacggccacgacccagtcgccgacgcggacgttgttgtcgtcggcccagttgacgtaggtgaacttcttgcccttgccgtcgaccttcaggaccgcgagatcggtgcgcgggtccttgccgatcagcttcgcctcgagttcggtaccgtccttcatgacggcgacgaaggccgcgccatctgcgacgacgtgattgttggtgacgatgtagccgtcttccgagatgaagaagccggagccctgggcgacgggacgcaggcgacccttttcgtcatgctggcccgggccgcctggacgcgcgccgggaggtccacgacgaccctgttcctcgccgaactggcggaagaacggcttcaacgcatcgggcacgtcatcgaagttgcggccgccgaaatcgaaggagaagccattgccttcttcctcggagaccggcttgatgcggctttcgacgcgaaccgacacgacggccggagaaacggcgtcgacgacattggcaaagctcggaacggacggcgcctcgaccttgaccgcctcggcgtaggacggcgtgagttggagaggaatgccggtcgccagaacggcggcggcgaggcccgcgacggtggaggccttgagcacggtcgacaacgacggagctttgatagtcttcagcatgagacgcacctttttatattcagatccacgggaccgacgattatcggatcggtcaatggatgaagatatagaacggcacaccttactgcgaactgtccgaggcatgaaaaattcgtaatgtccgtccctttcgcgcgaatggcggacaaacggacggcgctacttcttcaacaactcgtccagacgggcctgctcgtccgtcgtcagcggcgatcccgtcggctgcccggcatagcgccgggcgaaaacgacgagcgacagagcgcccagcaacgccagaaggatcggcgcgccccacagcagaaccgtcttcgtcccgaagcgcggcttgagcagaacgaactctccgtaacgcgacacgatgtagttcatcacctgttggtcgctgtcgccatcggtcaatcgcttcctgaccagcagccggagatctttcgccagttccgcgttggaatcgtcgatcgactggttctggcacaccatgcagcgcagttcggccgatatggcgcgcgctcggctctcgagcgcgggatcggccagcatctcgtccggattgaccgcgaaggcgggaaacgacaagcccagcagcatgacggccagaagcaggcgacgtatcattcggccggctccatggcgggttgcaccggccttgccttgcggcgcggggcgccgacgcgcagacgccgatcgctgagcgagacgaagccaccgatcgccatcaagatcgtgccgccccagatgaacaggatgaagggcttccaccatatgcgcacgaccatgctgccgtcgtcggcggcatcgcccagcgaaacgtagagctggctcgcgccgaaggtgaggatgccggcttccgtcgtcggcatctggccagcggtgtagatacgcttggaagaccagaaatcgcccacctcgtccacacccctggacacggtgaaatggccccgctcttcggtgaagttcgggccgttggccttcttcatgccgtcgaagcgcagcctgtatccgccggcgtccgtcacctggcccggcttcatctgaatgacaccttccgtctggaacgtcgtcaccgccacgatgccgagtacggtaacgccgagcccgccatgcgcgagcgccgtgccgaaggccgagcgcggcagtcccttgaggcgtcgccaggcaatatccagccgctgcttgccgatgccggcacggtaccagaggtcggcgatggcgccgaagaccatgaacaggccggcggctaggccgaggaccgacaggatcggcccgccgtgctggatatagaagaagacgagcgcgacgacgaaggcgaggatcgcgaccatgtagagccgctgcagggcgccgagcatatccccgcgcttccaggcgagaagcgggccgaacggcacgatgacgagcaatggcgccatcaggaggccgaaggtcatgttgaagaagggcgggccgacggaaatcttgtcgccggtcagcgtttccagcaccagcggatagagcgtcccggtcagcacggtgccgcaggcgaccgtcaggatcaggttgttgacgacaagcgcgccttctcgggaaatcggcgcgaagaggccgccggcggtcagcctcggcgccctgaaggcgaagagtgacagcgaaccgccgatgaacagcagcaggatgcagagaatgaagaggccgcgcgagggggcgctggcgaaggcgtgaaccgacgtcagcacgccagagcgcacgaggaaggttcccatcagcgacagcgagaaggtcaggatcgcaagcagcacggtccagatcttcagcgcctcgcgtttttccatgacgagcgcggagtgcagcagcgccgtgcccacgagccagggcatgaaggaggcgttctcgaccggatcccagaaccaccagccgccccagccgagctcgtaataggcccagtaggagcccatggcgatgccgagtgtcaggaaggtccaggcggccagcgtccagggacggacccagcgggcccaggcggcgtcgatgcggccctcgatcagggccgcgacggcaaacgagaagcagacggagaagccgacatagccgagatagagcagcggcggatggatggcgagaccgatatcctgcaggatcgggttcaagtccttgccctcggccggtgccggatcgaggcgctcgaagggattggaggtcagcaggatgaagagcgcgaaggccacgcagatccaggcctgcaccgagagcacattggccctcagcgtctcgggcagattgcggccgaagagggcgacgagcgcgctgaacagggcaaggatcagcagccagaggagcatcgacccttcgtgattgccccagacgccggagtatttgtagatcagcggcatcagcgaatgcgaattttcccagacgttcttgaccgagaagtccgacgagacatgcgcgtaggtgagcgtggcgaaggagaaggccaccagcaggaaggtgaccagcgaaccgaccggcccgacatccatcatcgcctgatccatgcgcctggcgccgaccagcgggacgatcgaaacgacgatcgcggtggcgagcgccagaatgagagcgtattggccgatttcgataatcatttccgcgcctcgtcctctttccagagcccctgctgcttcagcctgtcggcgacgtccttgggcatgtatttctcgtcatgcttggcaagcacggtatcggcggtgaagacgtcgctgccgctttcgaaggtgccctcggtcaccacgccctgcccctcgcgaaagagatcgggaagaatgccggtgaaccgcacggggaccagatcgcccgaggcatcggtcaccgcgaaacgcaccgtggaacccgcccctctgatgacgctgccctcgccgaccaggccgccgaggcggatacgggttccgggcggcaccgggttgctcgccagatccgctggcatgtagaaataggcgacggaattgctgaaggcgaacatgaccagcagcacggccgcgacgatgaagctcatgccgccgccgatcaccgcaaggcgtttctgcttgcgcgtcattgcaccgttccttgtgtcgccgtggcgtccgccggcagaccgagctcgcgggcgagcgcgaccagctgcttgcccttctcgccgtcggcggggaaagcagcaagcccgcgctgcagcgccgccgccgcgcggtccttgtcgttcaataccatataggagcgaaccagccgcagccatccatcgagattgtcggggttctcggtcagcttcgcgtcgagactgtcgaccatgccgcggatcatctgctggcgatcgccgctgttcatctggtcagccgccgcgacatcggcctgcgtcggtccgccgagcggggccggcgcggcggaagcgctgccggcggccggcgtgccgccgttttcgcccgccgccgtctcggcgccacccttctgggcgccaccgttttgggcgccaccgttcttggcgatatgctcgttgaccagcggcatccatggcgcatcggccggagattggctggcgatcgcctcgaagccggcgcgggcctcgtcggccttgcccgcctgctcgaggccaagcgcgatgtagaagcgggcgcgcgggttttccggttccagcgccagcgatcgcgtcagcgcgtcgcgggcatcgttggtcaccacaccgctcgatgccgccatcagcgtttcggcgagcccgtcaagccggaccggcgtttcgccgagcagccggatggcgttgcggtaggctgtctcggcatcggcgatacgcatggtgttgaagtagatcggcgccaggatatcccagcccttgccgtcatccgggttctgggccagatgccgctcggccttggcgacgagaatcgccatgtcgttgcccggattctccaggcgcgcctggaggggctgcgagggcagatcgggcctgcccatcatgatgtaaagacagagccccgtcagcggcagcattacgatgacgaagagctcggcggcgcgtcgatatccgcgtgtctgcctgggagcggccgcaactccggcgctcgatacggcaatcagccggcggccgatctcggcgcgggcgtattcggcctcctcggctgaaatcaggccgacggcgcggtcacggtcgagctcggcaagctggtcgcggtagaccgcgctctcgccggcacggctatcctcccccgccttcgagccccgcatgagcggaaaaagcagaatagcggcgaccgatgccgtcattacggccaggagaatccagaagatcatcatcgccaattactcgaagcgcgtgatcattccaatatgcaaagccgcgatgacgatgatttgaagcaatttgccgcatcttaccgggcgggcgagacgtcaggcgttcgttcagcccagtggcgaccagctgccatcgccgttgcggcaggccgaaccgcgcgccagggtgtccttgccgtcgatggtgagcgtgtgggtgtactggcggcaattctgcgagccgacctgatagggcgcagaggcgacgaccttgccgctgacgttgcggccgctccacgcgaccgcctgaccggcggcggccccttcgagcgcgcgatattcggcttccagcgcccgctgccggtcgctgttgctcaaggtcacgccggttcgcccgacgatgccgccctgcagggcttcgatgatggaggcggaggccgaggtcttgtgtccgccgaaaaggctgaacgacgggctgctcttcgtcgtctggcaaccggacaacgtcacgcatgccacgagagaaagaccaattatgccttttgagcgaagtatcatccagctgaacccgaacaaggtgtcaaacgcgccacagatgcaggcccacccgcctcaggccaaggtaaagcatgctatgcaagtgcctttctggcatcaagccgcccgtcacgcaacatcctttgtcacaccgggaagaataaggcgcgctttcagcccgccccactcgccgcgcgacagttccagacgcccctgatattcgttggcgatctcggtgacgatcgacaggccaaggccggtgccgggcttgctctcgtcgagccggcgtccgcgtttcagcgcctcgcggatctggtcgggctccagacccggaccatcatcctcgacgatcgcctcgacccaatggcggcgggcgctgccctccccgcccttgacgtcatcgggcgcttcggcgaccgaaagcctgaccttgtgcacggcgaagcgcgaggcattctccagcaggttgccgacgacctcttccagatcctgctgctccagcgccacggccagatgcggcggattgacgacgaggtcgaattccttgtcgacgttgaggcggcgcatgacgcgcaccagccgttccagcgccggctcggcgtcggtgcgggcgagaacggattcgcgctgggcggcgatgcgggcgcggttgagataggattgcacctggccctgcatcgattccgcctggctcttcaccagctcgccatgcgagcgctccagcacgcgcgcctcgttgagcagaaccgcgatcggcgtcttcagcgaatgcgcgagattgccgacctgcatgcgggcgcgctcgacgatgcggcggttgctgtcgatcagcgcgttgacctcgttggcgagcggcaggatttcgcgcgggaactcgcccttcagctgctcgctttcgccggcgcggatgcgctccagcgcggcgcgcgccttgtcgagcggcttcaggccatagagaatggcgagcgcgttgacgatcagactgccgacgccgaagccggcgagcgcgagatagagactgtgggagaaattgcggacgtcgtcctcgacgaccccgacattgccggtgacgcgaaagcgcgccgcgcgtccgtcggtgtcgagcaccacttccgtctcggccacctggatgcggttttcggaggtgtccgtcacctggtagtagcgctcgtaattcttgtcgaacggcgcttccagtacggagggaacggggatggtggtgacgccgagcgaaggcgaaaccagcggcggggcggtgtaggtcccgagcggctcgaccatccagtaccagccggtcttgggctgggcgaagcgcaggtcgccgagttgcgggctccccgacagcgcgccctgatcgccgatcgccacagagttgatgacgttgtaaagctgggcgcgcaggagatcctgaaagccgcgctcggcgctcttgcgatagagcgtcgagatcaacaggccgatcacgacaagcgccacggtcgaccagatcgtggtcagaagcaggacgcgtgcggtgagagacttaattcgcattggtcggcgcttggatgcggtagccgagaccgcgcaccgtttcgatcagatcgacgcccatcttcttgcgcaagcggcccacgaagacttcgatcgtgttgctgtcgcggtcgaaatcctggtcgtacatgtgttcgaccagctcggtgcgcgacaccacctcgcccatgtggtgcatgagataggcgagcagccggtactcgtgcgaggtcagcttcagcgccacgccgttgaccacggccttggaggtcttggtgtccaggcggacggggccgcagacgatctcggaggacgaatggccggcggcgcgacggatgagcgcgcggatgcgggccagcacctcctcgacgtggaacggcttcgtcacatagtcgtcggcgcccgcgtcgatgccggcgaccttgtcgctccagcggtcgcgggccgtcaggatcagcaccggcatgccgcgaccggcgccgcgccacttctccagaacgctgacgccatcaagttcgggaaggccgatatcgaggatgatcgcgtcatagggttcggtatcgccgaggaagtgtccctcctcgccgtcgaacgcctgatcgacgacgtagccggcctccttgagcgtatcgctcagctgacggttcagattgacgtcgtcttcgactaccaggatgcgcatcggtccgctttgctccgcttaatgtcttcgatgtctagatagggcgattctgcctacatcggaaccttgacggtcactttacgcggtcgctggccgttgccctggacgagcacggtgatgatgcaactgtcgccggagggctgaacggagagcagctgccccccggtcttgtccacgacctgctgggcggcttcactgcaatcgcctgctacgcgcaccaaaaggttgtgcgtattatccggtgagggcgacggtaccgtcagccaaacggccaaggctgcgacgctcataggagaggccatgtgctatgctttcaatggataccaacttgacctgactatgtactcaggagacctgaatggcaaatgaatgcactgtaatccggggcttttgagaggcgccgaaagcaggcggcaacgcagcggggaccgttgctgtggccggaaaggcacggtcggcggcagcgcgcccgccgccgcgcgcccatgcgattcacgttttcggtttgatcaccgatgtcgcggtcacccgcccgtagaccgccagcaagccacccagcgcgcccgcgatgttgacgatcgcatcgacgatctcgccacgatcggcggtcgcgatgtccacacccgtaaagtgcaaagccgaagcgatcatcgcaacgacggcgccccatatcgtcttcgagctgtaccagtttttcaattcaggcatcgtgcttctccttctgttgaaatgtcatgtctgaaagatcgcccgcgcgggcagcccaagcggcacgcgctcgccgatctggcgaatgctgaccgcgaggctcgtctgccgcccgccgaaatcgagcacctcgtcggcgagcggataggtccattccggcgtcccgacctccgccgcccggatcacggcgtcgacaccatccagcacctcgacccggtagcgctcgaagggttcgtcgagcggaatgtcggcgccggtccagctgtcggcattgtcgcgtccgcgccgtgtccacgaaatccgggcatccccggcttcggtgcgtcggcagcgcaggtgaaccggcgcgagcggtgtctcggccctgaggccgcccgcgaatgtgaacggccccgccatcgcaagcgaaccggccgcctcggcgatccagttgagcgacaggccggcctcgtcgccacgcagaccgagcggtttgaccgcctcgtcgagcagcacgaccgcggcaccctcgggaaggcctgagaccatcgcgtcctcggtgccggcaagcgcgcgcagcaatcctctcagccgccagcggccggccgcgatctcgtcggcctgcaggaaggacaggatttcccagacgccgctcgccgagcgcacagccagccgattggcaccgttcagcaccgatatcccggccgccgaggacagttcgccgtaagcgagatcgacgaccagcgcctgcgaccagtcgaagcggccggtgacaccgggcgcgagtgcggccacaagcgttcccgtggttgccggacggtcgaagaccgccctgccccgatatccctccgtcgtcgccgacgacgacaggccgacggtgcgccacggcttggcgaagaccgcgccgcgcgcgaagctcgtcgccgcctcgccgtcgaaccgcgggagatccatgaggtgcacgacgggcttgaacaaattcgacgcggtgccgccgccattgcggccgtcggtcatggccggcggcgcgccgccagcggacggcgcaaacgcccgcgcctcgatccggcgcgcatcgccatcctcgatgcgcgacaccaggaagcggccatcggggccatccgcgggcgagacgacatcgcccggctgcacatccagccggcccggcgccagcgagaagcgcaacgagcggcgggcgatgcgattgtcgcgcaacagcgcctcggccgcatggagcgccgtttcctcggcgagaacggccggcagatcctgcttgatcagccggctcgtcgcctgcccggcgcggtgcgagcgggcgcttgcctgctcgtaatcgagatcgggattgtagaaggtcatcaccgcctcggcggcgaaatcgctgtcgtggccgcgggtctcctgccacagcggctcatcctccctgtcgacaagcgttgtgatcgccagcgccggcatgctggcgcgggcccgcgagcggaaacgcaggaggccggcatcctcgaagacatcgatctggaatgcctgcagcagcggctcgatcaggtcgcgggcggaaccgagctcgcccttgacgtaaccgatcaggtcgccgctcacctcggagatgtcgaagtccgaaaagccatggtcacgcagcaccgccgccatgacgtcggccaaggtgccggctcccagcctgccgttcagccagtgcccggtgcgccagttgtttccgtccgaccagatatccgtcgacagcggaaaggccgggaatggccgcgcgtcccagcaccagacgaagagatgcgagggatcgaccatgccggcaggcgcatcatcgccggcccaccgcaaatggtgcgcctcgaggaaccggcgctgcatgccgtccgcgcgcatgccggtcgaaaaatacggcgccccgctttcggccgacttcgggtcggcgaagacattgggctggttggcgcccttgtcgacggcgccgcagccgagctcggtgaaccagaccggcttcgacgatgctacccaggccgtcggctgaccgcgctcggcgccgccgatgcgctcgtaatgcggattggcccaccaggcggcgatatccttgtagcggaagacccagggcttgccggccaggccatcggtgatcgggctgcgctgccgggctttgcgggcatcgccatcctggtaataccagtcgaagccctcgcccgcgcttatcgccgccatcaaggcgtttcgatcgtcggcaaggcggaagccgtcgggattggcgctggccagatcgccgtcgcgccagtcggcgagcggcatgtagttgtcgatgccgacggcatcgatcgcgggcgaggcccagagcgggtcgagatggaaatagacgtcgccgctgccatccgccgggtgatagccgaaatactcgctccagtcggcgccataggtgatcttgcttgaaggcaacagcgccctgacatcggccgccagccgcaccagcgcctcgacgaaggggaaggcatccgcgccgtcgcgcagctgcgtcaggccgcgcagctcggagccgatcaggaagccgtcgacgccgcccgcgagacgcgccagctgcgcgtagtgcaggatgaagcgccggtagctctcctcgccgccgggataggtcacatggccgcccgcgatcgtgaaatcgcttgctcgcgcattgccggcgaaggcttgcacctggccgcgcgcgaccgccgtacggtcagcgctgccttgtcgccccggcgccgggtcgcaggtgatgcggccgcgccagggataggacgcctgacgcgcgccgccatagggatcggcgagtgcgttgtcggcgggaatgtccatcatcacgaaaggatagagatagacctgaaggccccgcgccttgagatcggcgatcgccgagagcacgctggcatcatcgggcgtgccgccataggccgggccgccattgctgcggctgacgagacgggccgcggcgcgcgtgacgccggagacggaccacggtgcgctttcctccgcgcggctcgcaacctcgacgccaggcacgacgcggcattggccggcgcgcagatcggtcccgaaccaggagacgacgagcgccacgcgctcgagattggggcagagcgccatcagttcgtcgatcgagatatcccaatcgcttgcgccgcgcaggctgttgcgattgagaatgcgcgcactgccggcaccgaggctttccgaaacctgcgccagctggtaaccatgctcggtggcgccgggaatgatgcagacggccctgatctcattttccagctcgccgaccgatctcacgacctcgaactgcagcaacggaatgcggtttccgtaggcatccagcggcagccgttcgaagacgacataggcaaggccgcgataggccggcgcgttgcccgcaccctgcttggcctcgaccagcggatcgggcagctgcgcctcgtcgccacggtagacacgcatctcgatccccgtcaggtcgagttccttgccatcggcccagacgcgcctgacatgcccgatcggcccttcggcgaggcctaccgcgagattggcgaagtagcggaagctctcgacgcgggtgccgccggtggccttgccgccctgccgctcggtcgtcacctcctcctcgaaacgcgtcgcccagatcagcgtgccgccgatgcggacgctgccatagacgcggttgaccgccgtgccctcgtcggcgccgggaatgcgggcgctcgacaggcgggcgccgcgcacggtggagcggccgttgatcagcgccttgtcgacgacactgccggcaagagcgcccgccgcgcggccgatgacggcaccgacggggccgaaaacgccgcccagtgccgcgccggccgcctggaagagaagcgttgccatttttctctacctctccggaaaacgaaagacgcccgagatgcgccggcgccagctcggcaccagcggcgaggtcaccaccgccgcctgctcgtaggcatggatgaaccgccgctcgccgcagaggatgccggcatgcttggcggccagctgcgggcgccagcgaaacagaagcacgtcacccggcctcgcctcgacaagcggcagcgacgggccgaaatgcctgagtgccgcctccatcagccggtccccgccgccgcgctcggcccaatcgggcgcatagggcggcgggcgctccggctcctgtccgtaaagctcgcgccagatgcccctgatcagcccgagacaatcgcaaccgacgcccttcagcgaggcctgatgccggtagggcgtgccgatccagccttcggccagccgcagcacgtcgttggcgatgccggtgctcgcgatatcggtcatttgaacagcgcgctcccgtcgtgaaggctctcgccatcggcatacgtgtaggcgaaatcggtgccgggaatgtgtgggaagccgcgaaagttcagatagttggcgaactttgcccggcaggtcgagaaggccttgtcgcagcccgccgtgagcacgacgcgatcgcccgcccgtggcgtcgcctcgagcggcagccagagcgtcacctccaggagatcgtccttcaccgcatgcgtctcgatctccagccgctggccgtgattgccgccgtcgataaagctcagtacgccgaaccggaagaagccgtcgggcacggccctgatacccgagagcaggagccggctggcatccggcaccgaggccacgacgccttcggcgcgcatgccgggcgccaggagatcgacgccgcatctgccgtcgcccagcgtggcgtcgcagcgcctgccgtagacgcgcccctgcggctcgtcgaggcggctggcgaagctgcgcagttccgcctggaacttgcccgcgtcgcgcgtgacgtcaccgatttcctgcaccttcagcagtatatgctggtcgggttccgcccagtttacgagatggacctcgacgcgagcaccgtcatagcggccgcgcttgaggtcctcctcggtgatcgccgcgctggagaatccgccggcgacatcgctggtggcggcgggcaggcccgcctcctcttccgcggcactggcggaaaagccgctggccgccaggaaggtggtgcccgaaaacgtcaggtcgcgatcgtgttcggtgaacccaagcacgacgccatcgcgacgcgtcacccgccaggcccggcataccgtggtggcgtcgcccgaaagatgcgcctgaagtgcttgcggaatatgcctcatggcacgatctccatcagcggaatgctgggaatgcgcccggcgttgaaggccgagaggttgacgtcgatgcgcccggtcgcaaagcgcaccggcacgtcgaagaggaaccccgccgtcaccgacgcaccctgttgcggaacggcatcggccgcgaaagtgacgatgccggtcgcgacatcgcaggcgaaggcggacgccggcagcggtacgccatccaccgcgacgacgaccgagccctcgacgggcttggcgatccgccgcgtggctctggccccggcatcgccataggtcttgacgagcgggaaagcggcggtcacgccgtcgccgatcccgatcggctggtcgcccggtccgatctcggcacccggccgggtcgaggtccagtcgaccgggtcgcggaagcggaagccataaagctcgccgctacgcgcctcgaagaattccagcacctcgtagagatccgccaccgagcgcaggccggagccggcatcataactgcggcgcgcatcgcgccagcggctgttgcggctttcgcggccgttggaaagattgacgatatcggtgcgcctgaccggcccgccgctcgtcgacagcgacaggcggagcggaaagcgcacctcgtggaaaccggatgtcatcatcacctcacaggttgcgctggccgcgcatcgcggtgcgcgccagcatcgaggaaatctgcgcctcgctcttgcggaagctttccgcatccgtcgcggtaacgttgaagacgatctgcggtgcggccccggcacccggtgcggcgacgccgagcgaaccgtcggcaccgcgcttcaagggcaggatcgcctcgctgcccgcctcgcccatcaaccccgtgtcgccgccgagagggaaataggtgggctgcgacacgacaccgccattggcgaagggcagcagctttcccgcgccgccgaaaaggctcgatgcggcgcccgagatcatcgtctccagcggcttcaggcctgccgagagcgcgatatccgtcatgcgattggccaacccgcgcaaaacatcgtccagccccttgccgccggtaaccgcgcttcgcagcgcccctgacagcgccgaaccgaaggagcgcgagcggccttcgagatcgtcgagcgcgcgccgcagcgtttcggcttcgtcggtcatggccgacaggtcggcctggtcatcggtcatggtcgttcctcgcttcggatgttgcccggctgtcgggaaagcgcgccatcagcccgtcgagatcggcgcgtgagacgggcgcgcgcggcggcgagaggccaccggcggccgcgtgaaactccacgggcgtcatcgcccagaaggattgcgggggaagccgcagcaggcagagaccgacatgcagaacccgcgcccaggggaatggcgtggcacccgcattgtccgtcgtcttcatgtccgctgcggctagagggggcgcgcggaggcgtcggcgccatcccccaggaacgtcgccgtcagcaaatcgccgacgatcgcggcatagccgctgatgccgccctcgacatcggcctcagccacatcctcgtcggaatagagattgccgccgccgcgcaggccggcgccgatgatgcggatcatgtcggccgccttcagccgaccaccggcgaaacgctcggccagcccgttcaggctatcgaccgaaaacgccgtctcgagctcggccaaggcccccagcgtcaggcacaacacccgccgctcgccatcgatttcggcctcgatctcgccgcgccgtcgattggcccttcgcccgccaactgccggccctcccgcatggcccgacaaagcctgttcgcgagcctgtccgcgtacggccccgcccgccatcacagcgcctcgaacgatattgcgccggccgattccagcgccagctcgaacatcacctcaccattatactggccggaatattcgagcgcactcgcctggaacgggccggtgacggtgccgaaatccggcacgacgatctgccagccgaggatcgaggcattgaagaaggcattgcgcacaagctggtcggaggccgcgtccttgaagatgcctgaccccgacaccgaggcccgctgcacgccagccccgcccagaagctcgcgccagcgcccggcgctttcggcatcggtcacatccaccgtctcggcattgaaggccagccgcttcgagcgcagccccgccaccgtttcataatccgtgccgttgaaaaccctcaacagcaggtccttgcccttctgcgccaccatggccttatcccttccacgaaaaagggcgccccgtgagggacgcccgcgatgtcatcgacgatgtattgaattggccggccggggccgggctgcgtcagtgtctgcttctcaaaccaccacctccgtcaccgcccggaaccgcatctcggcgacatgcagccgcgtcttcggttcgcggcgggtgcgggtcgattgatgcagcaggccgacgaggtggtgggtctccaacgacagcggcgcgtcttgcagcattgcgcgcaggcgttccgcgatggtggatgcctgcccgcggccgccggcgtcggtccagatctccagcgtcagcaggtgctcggcgccggtttcggtcgccgtcgaatagtcgttgctcgcgatgtcggcgacgacgacggcggggagttttcggcccgagacgagccggtcgcgcaggccttccgggccgatcatggccgatagttccgtgtcgtcggcgaggcgtgcctggatcgccgtcagcagctggtttgcggcgctcatcggctttcctcctcgcacaggcagacgagataattgccgcgctcgtcgggatcgcgccaggcacgaatcgaaaaggcgcgcgtgcccttgcgcagccgcatgccggccttgagatcgtcgcggaagcgcagccagacgcggtgggtcagcgtgaagacgtcggctcccgcctgctcctcgcggagttcgccgacaggttcgatgcgtgcccagaaggaggcgatttcggcaaacgcgacggtggcgccgccctgcccgtccggcgtctcgaccggcgcttccagcgccagccgcgcggtcatctggccggggtcgaagaagaccgagcgcatcagagcctcctgatcatgaagggcgctatcaggcggtcgtaacccgagggaatatcggccggctgatcctccgccgcgaccgtgccgcgaaacgaaaacatctgcgcgacatgcatcagcatcgcccgctttagggtgtccggcacctcggcgccgctctcgccaaagcctgaggtgaaatcgatctcgatgccgttgatgggctggccggcacttatggcgcggccgagtacgagacgcgccggacgggcgcggccgtcgaggacgtggccggtcagcggcagttggacctcttcgccggatgcatcgtaaagcctcaggctttcaatggtttggacgggacctctcgcgatctgaatcacgccgtcttcaggaactgaatcaagatagaggcgccaggtctgggtgatgaggctgaggccggtggtgcgctccaggtgctcgcgggcggtgcggatgagggagatgagcagtgtgtcctcgttggtatcgtcgaggcgcaggtgggatttggtctcggcgagggtgatgggttcggatgcgggtggggtgatgagggcgtaggtcatgggtggggttcctggtatggtagaaggtggaggcttcttgtgagaggtcgtgctgtgtggccccctcatccgcctgccggcaccttctccccgctggggagaagagactcggggttggccgctcgcgccgacctccccttctcccccatggggagaaggtggcccgaagggtcggatgagggggctccgggcgcgacgccagccgcattcaaggctgcgcaccgcacccacaccctctcacccactcaactcacggcaaacttcaccagcttgatcgcctcgaagttctgcaccccgccgccaacccgtttcgtcgtgtagaacaacacatacggcttggccgaatagggatcgcgcagcacccgcacccccgtacgatcaaccaccagatagccggcgcggaagtcgccgaaggcgatcgacagcgcattggcggcgatgtcgggcatgtcctcggcttcgacgacggggaagccgacgagcgaggcggcttcgcccgccgttgccggcggctgccagaggtagcggccttcggcgtccttcagcttgcgcacctcggcctgggtcttgcggttcatcacgaagttggcgttctggcggtggcccgccttcagcgaatagatcgtgtcgatcagcgtgtcggaagcaccggtcgccttgaagccgccggcggcgccggtggcgatgtagccgagattgccccagctccaggcgctgtcggcgacggccggataggcaagaagacccttcggcttgttgacgccgtcgccggcgacgaaggccgcaccttcctgttcggcgaagacggtatcgacctcgctagagatccaggcctcgatatcgacggcggcatcgtcgagcagcgcctgggtggcggccggcatggcgtagagctccatggtcgggaagctcaactcggcaagctgggcgctattggtctgcggccgcgcggcggtctcggccacccagccggacgccatgccggagatcgcgaagggcttcttcagcaccgcgccggaaacctgacgcaccgtcgcgatcgagcggatcggcgagaccacggaaaggcggcggccgatcgcgctgtcggtttcgtcgggcacgagatagccgccatcggcacccgagcccgaggacatggccttggcctcgatctcgcgcaggccggcctcgtcgccccggcggatgtactgctcgaaggcctgcttgtgctcggtgatctcggcgctcgccgatgcggtgcggccaagcggcgggcgggccttcttcagcgccagctggtcgagtaccttcttctgctcgtccatcgcgcggctgatgcggtccatcttgtcgcgggtgacgacatccgacgtcagcttctgctcgatctcgccgagcctggcatcgttggtttccttgaaggcctcgaaggcttccatgaactcgtcgaaggcggcggtcatttcgggcgcggccttgatctcgggtgcggccttcgcgtgggaggcggcaatctgcgtgtcggtcattgcgggatcatcctttctggagggtctacttgaatgtgtcttgcagcatcatccgggcggcccggcgcatggcgcggacgagctcggtctccttgtcgcggaaccaccgcgcattcttgatgttctgcacgcgggcggacggcagcatcgggaaggtcaccaccgagatctcccagaggtcggcctcgaggatgcggcgcacgccggacttggcatcggtcctggcgcggacggtgcgaaagccgatcgacaggccatcgagcgcgccgttcttcaaaagctgatgcacctcgcgggctcgactgacgccatcggcgagcacgccctcgacatagagcccgcggctatcctcgcggatcgtcttccaggcgccgatcggctcggccggatcatgctggaagagcatgcgcacgccagccgcaccacgcgtcttgagcgaacgcagaaaggcgccgcgctcgatcgcgtccttgccgagatcgacctcgccgaagacgctggcatagccggagaaggtgccgtcacggctgaggccgcgcagctccagattggcgaacttgcgcgtatccgcgccgggaacggcccgggtggacaagcgcgtggggggtcgcgccagcgcgcggcttgcggtcatgatcatgctcctcgtttcatggttctgtggccggtgccttaccgattgcgggcgccgtagcggccggcgatgcgctggagaatgccgagcccccaccaggcgcagaggctggatgcggccgagcccgacagcatcacctcggacacggagagctggtcggaaagctgcagctgctcggcgatccagagcccgctcggaccgccgaagatgaggccgcaggcaaggccggtgaaaaaccggctcgccgcctcgcgccggctcttcggcaaaagatagatcagcgacacggcggcacccgccgacgcgcccagcgccctggtcgcccagagccctgtttcgttggagaaatcggccattggtttgggcctttgtgcgtggggtgtgggggtgcgcgaggcgcacgtcttccatcgcagcgatgctgcggccgattcaattctgctgtcttttgagtctgttgcggatagccgttctaagattgagtccggcggttcacacggtgaatcaattaccgatgaggtcagcccaacgaggctcaaaacccgcgcggcacccgtgacgcgtcagtcgctctcgtcgagcccgtcgtccctgtccagttgctcgcgctgtctgccgtgggtgatgttggagaccatgatggcatcgcggccgatgcggtaggtgatgatataggggccgacgaccaactggcggcgtcctgtcagcacaggcacgggagcgccgacctggggataggcggcgagccttctaatgccgccttggattcttgccatggcggcgtcggcagcgcgggaattgaacgcgctgagatagccatattcgtggctgagatagtccgcggcatccttggaaagaatgaccttcatcatgccgcgtcatctctgggagacgatgtcagttcccgcatgaactcctcgaaatcaacggtctcgccattgcggatctgctcttcgcccttcagcgtctgcagaacatcattcccctcttccatcagatagtatttcagcgcccggacaatgacccagctgcggctgcggtcggtggcctttgcgatggtctcgatgtccttcagcatgtcttctggaatgcgcagggcaatcgggtcggagagaacgggcttggtcatcggcttgctcctcgatttgtaatacgctgtataacaaatttcgaaacaggcctcaacgtcagccccgcactcgtcgtcctgacgacgttgcgaaacgtcagcgatatccgccgtccgcgtgggcgcttctcgccatcgacgatatcggcaagccgcgctggaatctcatgcgtccattcatagcgcgccgggccatccattttcagcagcgaacgcggttccagcgtcaacgtccgtttctcgccggtggcgggatgacggaagatcatctcgcagggcgacaggaggctgagcgaggcgatgtcgccgaaacaggggacgcaatcgacgtgggcgctgatcccctgccccggatgatattcgttggcgatgacctgatcaggcggctctacgaagtgctgacccgatactaggcgggcaaccacgtcgcgaagccaatccggcagagccccaagataggcatcaccggtcaccgcccgggcgcgatagtcatagcgatatccgaaatgctggacgcggcgcttcagggtctcgtcccatggcgacccatccagcgccgcgacgagcgcatcggccatctcctcggagatgaaatccggccggtatgtcagaccgtcgggaagcgctgagtgcatcggcatcatttacactctatgcctgcatttggccagacgactcccctcaataccccaccgcctgccgcttctcctcatccgtcagaaacgccgcctcgcccacgcgtttccagagctcgccgcgctcggcgccgagacccgcgaccttgtcgagatccggttccagccgcagcccgtcgccgtagcctgcggccgcccaggtcgacagcgccgccagcgtgcgggtcagcatcggcagcacggtcagcctatagaaggcgcggttggcttcctggtagttggcgtaggtgttgtcgccggggatgccgagcagcatggggggcacgccgaaggcgagcgcgatgtcgcgggcagcaccgttgcgggcctcgacgaagtccatgtccttgggcgacaggcccatggatttccagtcgagcccgccttcgagcagcaacggccggccggcgcgcatcgggccggaatagccctcgtcgagctcctgcttcagccgctcatactgatcgggcgaaaggttgccgccctccttgggctggtagacgagcgcaccggaggggcgcgcggaattatccagcagcgccttgttccaggtggcggccgcattggagagatcgagcgccacctgggctgccgccagcggcggaaaaccgagatgatcgtcgagcgggtggaagagtttcaggtgcagcaggccaagcccgtccgtctcgacgggaaagcggcggacgaggccgccggcgcgataatcataggcctccggccagccgtcgcggccctcgacgaggccaatgcgatccggccgcaacagatgcagctcgcgcagcgcgccgccgatctcgaccggctcgacgtaggcattgcccgacagcagcaggtggccgtagagcgcctcgaagaaatcggggccgctcatgcgggcgttcggctggcgcaggagatgaagcagggggtgatcgggccgctcgcggtcctgctcgtagatcaagagcggcaccgaggccgccgcctccgaaatcatcctcacgcagcgatgcgccaccggattgcgcatgaagccctcgcgtgacaaggccgcgtaggagcgcccggtccagctcgcgctgccctgcgatgtcagcgacacgaagccggtggcggcttttcgttcgggtacgtcatgacgttcgggcacgggcttgcggcccgccggggagccccacggcaggagagatcgaaatttcatgatccggtttcctgatgtttgcgaccggcatttggccggccgatgctgtcgtctctatcttgcgatcgagcctaagtcgcctcggcggcgtggtcgcgagcatttcccggcaacgtgaacactccaggatgaagcgcggccgaaccacgtccagccgccggcatcacagtgccgagccgatgatgttgcaaagccggcgcgcaccacgcaccgggtggtgcgcggcggcgatcaggctgccagatcgatcgccatctcggctatgatccggtcccacgggacgaatatctggttattgtcgttgcgctcgatcaggtcgatcaacatcagcgcatgcacgtcgttgtgcacggcgcggtaatcgcgctccagaagcctcgcgagttggcggatggaggttttgccctggtgcctcagcgtccgcaaaagctgccagcggctggcggtcaggaccttcagcagcgtttccatgctctcgaaggcgacgacacccggctgctcgctgacgtcgccgctgtcgatacggcgcgcaccttccatcgcacccttgaagaattcgtcgagatcggtgacatgcagcttaacttctggcattcgcaatctcccgtctcacatccatgtcgaaatcgagaagcagctgctccagcgtcttgaacgcataaggctcctcccggtcgcggtagtgccggtggtcgcctttacccgcttcattgtcataagcgatgattcgctcgcccggcctgccgtaaaagagcgaatatttcaggccatgcggtcgctcggggctcggcgcctgcagccgccaaaccctgatctgcaagatcgctccgtcgtctagaacaacctttcggctgtaaatcagggtcgcaggcggcatatgctctatataacatatgctccggaagccatcaatcaccccagcggctgcttcaccgccaggtcgctctcgtagtccgccgccatgcgcagttcgcggatggggcgaacgaggctggtggagagctggtagttcgggtgcgccttgtaggcggcgagcgctgcttcgtcgtcgaactcgccgtagacgacaagatcgacctcggtgccgaactggtcggtcttcacgttggtgccgatctccagcagccgggcgtgcgggatggccgtcaggatcgacaggccctcgcggaccttgtccatgttttcgatcggcgccgtgaagaagacgatgtgacggatcacgcgggactcctgtatgtctgatgagggctcagcccataagccgggcgataccacggcaaagccactgcttcaaccgggcgaaccagccccgcgggcggtcggggcgcagggcggcgagaaaggtcttgccatagcccgccagtttttcggcccggtcggtgccgttgacgatgcgccgcgcgttgatccagtcgtcgctcgtggcgttcagatggtcggcaagcttgtgcctggagaagctgccccgcaccatgccctcgatcaggatcgacaccgccggccccatctccatcgcccggtcgggattggcgacgagatcgatgccgacgagcgggctcatggcctcgtagttgcgcttgtgggtgagctgcacgaggccgcggccgagccagctcttgccgtccgcgtcgggccgccaatagggcgtcttcacccaggagagcttgccgccggcgaaggctttttcgagaatctccacggcgcgggcatccgtcgtcgccagcgtctcgcgcacgggctgcatggtgtaggcggtctcgtggaaggcggtcgccaggatataggccagccagcgggggtcggcatcgggcatccgctcctcccagaaattcagaatcgccgtcatgccctcgacctgcggcgcggaaagcgtgccgttgaacagcgtgccgcgcaccgtgtcgaagaaaaaccgcctgtcgatgtggataaccatagcgtgtaatcctaaaagctaatgagcacttcgtgtccttaatcgattaaatttattttaatcgtttaaagcgtttaaggccctgatttacagaccgtttggcgcgtggcagtgatgatccatcattcaatccgtctctggaggaccgcatgacgcagcccgttcacagcaatcagccaatcattccgcagcacgtgacggaccaactcgaaagcgagtggcgtcaggttcgcccggtgccgcaggcgccgcgcccggccccgcagcaacagcagcgttaagcgcaagtgccagggggtgtcaaacaccccctcatctccaggcattgcggaatttcatattccccgcaccctcggctcgccgccgccttcaagcatcaatgccgtcagcgcccagaccagcgcgtccagccggtcgggagaacggcccgaggacaatccgtccgggccgaaatcgcacatctgatcctccagcgccatgaaacgcccggcatgggcgacacgcccctgctcgtagagagccgccaccggctcggcacgcaggaacttgccgcgcgtggcgcgcaccgtcgccaccggcaatgtctcgtcgatgcttttgagcatggcggtcaccatgtcgccgccctggttgatctcggccaccacgcggtcggcggcgaagcggcgataggctttcgccaccgcgctcgcccagccggccgggctcgcgccctccaccgaacaatccgccagcaccaccgcgcggcccgcgccatcgagcccggccacgacgatgccgcagcaggaattcggtccggccgccgccggcggatcgaccgccacgacgatgcggcgcagatcgccggacatgcgtatcgtcacggcgtcgaacatctcgcggcgccacagcgcatcctcgcgatcctcgatcagctcaccatcgagctcctggcgccccagccgggtgccgccatagcgatttgccagcgcctcgatgaagccgggcgccaggttgtgttgattgtcgcgggtgctgatgcgtgtcgtcagcgtcgccgggtccgatatcagcgccttcaagagcgggaccgggcgcggcgtcgtcgttaccaactggcgcggcgcggtgcccagtctcaggccaaactgcagcatgtcccaggtctcctgcccgtgcttccatttggcgagctcgtcgctccaggcgaaatggaattgcggcccgcgcaggctttcgggatcttccgacgagaaaatctgcgccaccgcgccgttcggccagaccaatcggcggcgggatatctcgaactcgggacggtagcggcgggcgatccgcatgatgcccgagatgccgtcgatcatcacctcgcgggcgtcgccaagcgtttcggcgatcagcgcaatgcgcagatccgaggagcgaccggcgctggcaatagcatgcacccattccgcgcccgcccgcgtcttgccggagccgcgtccgcccatgatcagccatgtgcgccagtctcccggcggcggctgctgttcgtcgcggccggtgaaggcccagaggtcgccgagcgatggccagagcttcagccgttccgccaggtgctcggcggagagatcgagcatgtcggccggcgagagattgggctggccgttatcgggaacggcgccagcttcggcatcggcgccagcatggacatcggcgttggcatcagcgtcagcatggaggtttgcgttggcggaccggggcacactgttcgccactgcgtcaaccaccggtgcctcaccggaaaccaccgctgcgaccgtcccgttatccgtttgcgacatcgccccgatcagcgtggcgccgggcctgccggcacccaagatcactgcgcggtcatcagcccgtttcgccacgatcgcatccatcttatgactgtagtccagcaaggcgccaacgaccttgctcgcattggcgtccgcgacgcgcttctcaacccggttcggcttcgcgactggcgagcgctggtccgtcgtcagcggctgggggagcgccgtcgcgctgccattcggccagcaattgccgggcgcgggtttcggcccgctcttcgatgcgtgcgaggaatttcgctttggcatggtcgagtcccttcgccgcttcgctttcctcggcagcctgctcgcggtcgcgggcgaactggcgctgcagctggtcgattttctccagcgtgcgcacgatcagcgacatggcatcggtcgcggccttcagatcagcgcgggcaagctttgcggcggcatcgtcgccaccgctcgacgccacctgctcggccgcccttcgcaggtcgcgaaaggccgcgaactgctcacgcatctcggccgtcatctcgttcaggagcacgcgcagctcttcggcgggcgatgcggcggatttggtctccagcaagcaggcctcggccactgccttcgccctgtccgcgtcgagcgcctgcgagggatcgccgtcataagcatggtattgggaggcatggtgagccggccagagcccaaacagctccagcgcgaaatcgtcgatatcggtcatgggaaatcccgtggcaactggtgttgcgtggaacggcggagggccggcaaggcctgtcgatcggccaggagaccatgctccccgccgcgttctgcccgcaactttccgactatgccataaacctatcaaagcaccgtaacgccgtcaaggattattttcctattctcgccgatttcatatcagcggccttgcgggcgacaacacggtcgagcgcaagccattgcgcgacaatggttttccttgcgcgtgccgatcaccggcggcgggtcagtatttctgattggcctcgcaatattctattgtgctaaaataaaaatcatgacccgcgaagagcttgcatctttcgcgctcagcctgcccgaggcggtcgagagcgcgcatcacggcacacgcgattttcgcgtgcgaaccaagattttcctgacgatgccggagcaggattattgcgtcgtccggctgacgccggaacagcagcacatgacgctggcggtctcgccgaaggagacggtcgcggttcccggcggctgggggctgcgcgggtcgacgcggctgttctttcagctggcgagcgacgcgctggtgcaggatctggtgcgccgctcctggcagaacgccgcgccgaaaaccctgcaaagacagttcgttgtcatcccttccccataagtcgattcagctagaaccaactcagcgattgcccacctcatccggcgtcttcggcgcatcgtcgcccaccgtcagcggccagtcgaccacatagtcctcgtaattgtcgacatcgatgccggtctcgtcgatggtgcgtccgcgcgccgaaatgccggcgatgtgcaccgtctcggggtcgcccgagaccagcggatgccaccagtagagttcgcgtccctcgttgagcagccggtagccgcaggtcggcggcagccacgggatctcgtcgacattctgcttggtcagctgcacgcagtcgggcacgaaatcccaacggttcgggtagctggaacactgacagctctcgccatccagcagcttgcagcggatcgaggtgaagtagatatcgccgctctcccactcctcgagcttgttgagacaacagagaccgcagccgtcgcagatgctttcccactcggcattggtcatctcgttcagcgtcttttgcttccagaagggttgctcttccatcattccgttcttgcaacagcacccgcaaaatcgcgtgagtgctttccatttctcttgttcttccgtggcaaatcaaccaaagattcaccctgtgccggtaaccccggatgcgagcggcagatttgccatagttcgacgtcaggctattccacgtcgaaccgactgatcgggcgggaatataagacgtgacggatccggacaatccagaaaaccagccgcgcaagaaacgccacttgctgctgaagatcgattcctggatcgattccacgatctggaacgccggtttccgctccgccgaaatctgggaagacatcaccatcttcttccgccgcttccgcgttcgcggctggaagcgcgcggtgttcgaggtcgccggcgaaggcctgacatgggggtcggtcggcgccgtcttgatgctcgcccttgcccagccagccttcgaggctaccaaggaagattggcgcaatcgcggcgactacgccgtgacctttctcgaccgctatggcaacgtcatcggccatcgcggcgtcatccaccagaattcggtgccgatcgacgagctgcccgacagcctgatcaaatcggtgctggcgaccgaagaccgccgctttttcagccacttcggcatcgacgtgatcggcctgttccgcgccatggtcacgaatgcgcaggccggcggcgtggtccagggcggctcgacgctgacgcaacagctcgccaagaacctgtttctctccaacgagcgatcgatcgaccgcaagatcaccgaggccttcctggcgctctggctcgaagcgaacctctcgaagaaggaaatcctctccacctatctcgaccgcgcctatatgggcggcggcaccttcggggcggcggcggcggcgcagttctatttcggcaagaacatcaccgacgtcaacctcgccgaatccgccatgctggccggtctcttcaaggcaccggcgaaatacgcgccgcatgtcaacctgccggccgcgcgcggccgcgccaacgaggttttgaccaatctggtgcagagcggcatgatgaccgagggccaggtgatcgccgcgcggcgcagcccggccaccgtcgtcgaccgcaaccaggtggaatcgcccgatttcttcctcgactgggccttcgacgaagtgatgcggctttctccgcgcttcagcgagcattcggtgatcgtccgcaccacgatcgacatgggcattcagaacgccgccgacgatgccatggagacgtcgctgcgcgaattcggcgagagctacaaggccaagcagggcgcgctggtgacgatcgaaaacggcggcgccgtgcgcgccatggtcggcgggcgcgattacggcgagagccagttcaaccgtgccaccaaggcgatgcgccagccgggctcgtccttcaaggtctacacctattcggtggccatggagaacggcatgacaccggacagcatcgtcgtcgacgcgccgatctcctggggcaactggagcccgcgcaactacgagaaccgctatgccggccgcgtcaccgtcgcgaacgcgatcgcgcaatcgatcaacaccattccggtacgccttgccaaggagaagttcgggatcgcgccgatccgggcgatggccaccaatctcggcgtcgaatcgcctgttcgggacgacgtgacgatcccgatcggcacctccgaagtcacggtgatggaccaggcgaccgcctatgcggtgttcccggccggcggctaccagtcgcgccggcacggcatcacccagatcctcgactatggcggcaaggttctctacgacttcgaacgcgacgagccgccggccaagcgggtgctctccgagaaggccgacgcctacatgaaccagatgctctcgcgcgtgccctatgtcggcacggcgcgccgcgcggcgctcgacaacggcatcctgacggcgggcaagaccggcacgacgcaggcctaccgcgatgcctggttcgtcggctataccggcaatttcaccaccgccgtatggttcggcaacgacgactacacctcgaccaacaagatgaccggcggcacgctgccggccatgaccttcaagcgggtcatggactacgcccaccagggcatcacgccgcgccagttggtaacgacgacgccgcgcccggtcccgctcttgaaggcgct

SEQ ID NO: 3 - DNA, 513184 bp, Rhizobium matallidurans
  source 1..513184: mol_type = genomic DNA
ctcttctccccaacggggagaagtgccggagcgtagcgaggcgatgagggggctccgggttctgagccagtcattctgtgctgcaccccgtagcgcgaaacctcaatccccttcgccacgcccattgacgatctcgcgcttgcccacatggttggccggcccgacgaggccttccttctccatccgctcgacgagcgaagcggcgcggttgtagccgatgccgaggcggcgctggatgtaggaggtcgagcacttcttgtcgcgcagaacgactttcacggccttgtcgtagaggtcgttgccgtcctcggcggccatgtcgcccttgtcgaacacggcgctgtcttcttcctcgccgtcttcctcttcgtcggcggtcaccgtgtcgagatattccggccgtccctgcgtcttcagatgggccacgaccttctcgacctcggcgtcggagacgaacgggccgtggacgcgcgagatgcgcccgccgccctgcatgtgcagcatgtcgccctggccgagcagctgttcggcgccctgttcgccaaggatcgtgcggctgtcgatcttagaggtcacctggaaggagatgcgggtcgggaagttggccttgatcgtgccggtgatgacgtcgaccgaaggacgctgcgtcgccatgatcaggtggatgccggcggcacgcgccatctgcgccagtcgctggatcgcgccttcgatttccttgccggccaccatcatcaggtcggccatctcgtcgacgatgacgacgatgtaaggcatcggcgtcaggtcgagttcctgctgttcctcgatgggcgcaccggtgctgcggtcgaagccggtctgcaccatgatgtggatcgtctcgcccttttccttggcctgcgccacgcggccgttatagccgtcgatattgcgcacgccgaggcgcgacatcttgcggtagcgctcttccatctcgcgcaccgcccacttcagcgccatcacggccttcttcgggtcggtcaccacgggcgtcagcagatgcggaatgccgtcatagatcgacagttccagcattttcggatcgatcatgatcaggcggcactgttccggcgtcatccggtagagcagcgagagaatcatggtgttgacggcgaccgatttacccgaaccggtggtgccggccacgagcagatgcggcatcttcgccagctcggcgatcacgggctcgccgccgatcgtcttgccgagcccgagcgccagcttgtagctgctcttctcgaaatcggcgctctcgatcatctcgcggaaatagacggtttcgcgcagcgcgttcggcagttcgatgccgatgacattgcggccgggaaccacggcgacgcgcgccgaaagggccgacatcgagcgggcgatatcgtcggcaagaccaatgacgcgcgaggatttcacgcccggcgccggctcgaattcataaagcgtcacgacagggccggggcgcacatggatgatctcgcccttgatgccgaaatcttccagaacgctttccagaagcccggcattctgctccagcgcttcctgcgacatgatttcgccgatgcgttccggcggctcctgcagcagcgaattggagggaaattcatagcccgaggcatcgaccttggagggaacgaacttgtgcgccaccatgcgggcagcaggtgccagcggcgcgatcgccggctgcgaacgaaccggcatcggcgcgatcggctgcgctactgatggctgcggctcgatggcgatcggctgcaagacctgcggggcaggggcgggggccagtgcatcggcggcggcggcctgctgcttcagtctgaccgcaagcggctggcggatcggtgcgcgaccggtggtcggggccggcgccacgacaacaggcgctgcaacggaagcggcaggcgtagccgttacgacgggcgcgacgatcggggccgcgacgggagcaggggcaacggcaaccggcagcggcgcggcatagggagcggcgaccacgggctgcttgcccgggcgccattccatgatgcggaactggctgatgatcgaatgcggctcggagacggtctgcggcgcgacgatctgcacctgcggtaccgcttccaccggctcgacgggcgcctcgccatcctcgaaggacatcacttcccagaaggcgaagtcggagatcggggcgaggttggaagaggcatggaactgcgcttcgtcggcggtatcggaaacgacgatcgcgttttcttcgacggcagcgacattggctgccggctggtagacatcgaagggcacgttgaccaagggcgcgcgcggcgtgaccacggacgcgctgggcgtgaacacgggcgcgccgggcgtgaccaagggcgcgcgcgggccggccggctgcggcgcataggcattgcgcagcgcctgctgctgaacgtgcggctgcggctgggtgacggcaggctgcatggtggcctggcgggcaacatagccctggcgcggctgtgcggcgggctgcggcgtcacgacgatcggctgggccaccggcgccatcaccttcacggccgccggtgcccccacttgggcgggctgcggggcgggtgttgccacctgcgcgggctccatcacccgctgctgcaccggttcggccggctgcttgcgggggttgatctggctttccggcgtgcgggtaaagcggacattcggcgccagcgaaaagttgttctgccagatcggcggcaccggcttctcgccggcctgttcctgcagctgttcggccgggatgtcggcggaaatttcaccggcatccgtcagattggttctaggaaagcgcatacgaccgctactcactcatgattagcaactattatcctcttccggcttaggaaatgaaggttaataagttccttctccgcgccctcgcgggacatgggcaatcatagggaatgcaagccttttcagacgcttaggtgataaagaaaattttagcgaattttcgacgaggcgccctaatgcgcctcgtcccagttggtcgccgcgcgcgcatccaccttcagcggcacacgcatttcgagcgccggcatggtggcgttttccatcaccgaaacaatgatcggcatggccttgtcgacatcctcgtcctcgacctcgaagatcagttcgtcgtgcacctgcaacagcatgcgcacccgctcggaaagcccggcttctgcaagcgccggctccatcttgatcatcgcccttcggatcacgtcggcggccgagccctggatcggggcgttgatcgccgcgcgctcgttgaaggcgcgcaccgaggggttggaggagcgaatctccggatagttgattcgccgcccgaagatcgtctcgacatagcccttgtcgcgcgcctgctgcttggtgctgtccatgtagtcgcgaatgccggggaagcgctcgaaatagcgcttgatgtagtcgccggcttccgagcgttcgatcgagagctggttggcaaggccgaaggccgagatgccgtagatgatgccgaagttgatcgccttggcgcggcggcgcacctccgacggcatcccttcgaccggaacgccgaacatttcggacgccgtcatcgcgtgaatatcgatcccgtcggcgaaggcctgcgtcaactgcgggatttcggcgacatgggcgagcacgcgcagctcgatctggctgtagtcggccgagatcagcttgtggcccggcgtcgagatgaaggcggtgcggatcttgcggccttcggcggtacgaaccggaatgttctgcaggttgggttccgacgaggaaagtcgccccgtcgtcgtcgatgccagcgagtaggaggtatgcacccgcttcgtctgcgggtgcacatagcccggcagcgcgtcggtataggtggatttgagcttggtcagctgccgccagtcgacgatcttgcgcggcagttccagccccgccgccgccaggtcctccagcacgctggccgaggtcgaccactggccggtctttgtcttcgagccgccggcaagacccatcttgccgaacaggatgtcgcccagctgcttcggcgagccgatgttgaaacgctcgccggccagctggtagatctcgtcctcaagccgcgccgcgccctgcgccaactcgcccgagagccgcgacagaatctgccggtcgacggtaatcccccgctcttccatatgcgcgagaacaggcagcagcggccgctccagccgctcatagacggtggtgagcttctcggccgccagccgcggcttcagcaccatccagagcctgagcgttacatcggcatcctccgccgcgtaatgcgtggcccggtcgatatcgacgagatcgaaggaaatgttcgacttgccgctgccggccacgtccttgtaggcgatcggcttgtggttgagaaacttctccgacagcggatccatgccatgcgcgccggtgccggcgtcgagcacgtaggagatcagcatcgtgtcgtcgaagttcttcgtttcgacgccgtagcgcttcatcagcaggtagtcgtatttcaggttctgcgccaccttgagcaccgactggtcctcgagcagcgccttcagcctcggcaacgcgtcgcgcatcgcgatctggttctcggccatgccgccgcccaagagatcgccgacgccggtcttgtggccgagcggcacataagctgcgcggatgttgacgcccgttgggctcttcgcgttatcggcaatcgccatcgagaagccgacgagctcggcctgcatcgcgtcgagcgaggtcgtctcggtgtcgaagccgatcacgccggtctcgcgcgcatcggcgatccacctgtcgagcgtcgcgacatcacggatcgtcacatagcgcgagtggtcgaagggcaggttggcgaaggcgtccgcccgcgacttggcgaaatcggacggcgtgaagctgccctcgggcgcggcggagccattgaccttagtcggaacagcgacggcatcgccgacaacctcaggcgtcccgccggcaacaggcgccggttcggccacgtcgagatcaggaccatgcgcattggcgccccactcgaccggcacgtcgacggcatcgatggcgcttgcatcgcactcgcaggcctcggccacgcgccgcgtcaggctggtgaactgcatggccttcaggaagccgatcagcttcggcccgtcctgcgcctcgagaatgaggtcgttgacggcaagctccagcggcacgtcggtcctgagcttgacgagttcacgcgacagccacgccttgtcggcattctcgatgatcgtctgccggcgcttctcctgcttgatctcggtggcgcgcgcaagcagcgtgtcgaggtcgccatattcggcaagcagcgtcgccgccgtcttcgggccgatgccgggaatgccgggcacgttgtcgacggaatcgccggtcatcgcctgcaggtcgatcatcttttccggcggcacgccccatttctcgatcacgtcgggaatgccgatctgcttgtccttcatgctgtcgtacatgtggacgttatcggtgacgagctgcatcaggtccttgtcggaggagacgatcgtcacgtcggcgccaagcgcttcggcctgccgcgcataggtggcgatgatgtcgtcggcctcgaagccctcggtctcgatgcagggcaggttgaaggcgcgcgtcgcctggcggatcagcccgaactgcgggatcagctcttccggcggcgccgagcggttggccttgtaggcgtcatagagatccttgcggaaggtcttcgacgaatagtcgaagatgacggccagatgcgtcggcgtcacgcccaccgacgtgtcgcgcgcctccgtcaggagcttccacagcatgttgcagaaacccgagacggcgccgacaggcagcccgtcggatttgcgcgtcagcggcggcagggcatggaaggctcgaaagatgaatccggagccgtcgacaagaaagagatgatcgccttttttcatggcagcatggatagcgcgaccgccctgcgaggtccatataaagttagggtgctggcgcgttgcgcacatgcttgggaagtgccggaaaacgggtggaaacggccataacccctcaatagctgcggcttgttccaggcgtttttcgcccgtacattaggcggaggccaaagggagtccgcaatgtctggagaacccgaatcgcagaggtatattctcaaccagatctccatgctgcttgatggcgtgaaggggttgaataccaagatcgctcgccaggtcgacgcaattggtcggtacgatgtcgagttcatcaagctagggcgcttcatgaacaagttcgagggcgagttgatcgaactcagggctgacatgggaaaggtgaagctggaagttggccagctgagaattgagatcggcgaggcacgaaccgacgtcggtcaactgagaaccgagatggggcaatttcgctcggaggtgggtcagtttcgctcggagatggaagctcggctcgacgcgatcctgaagcgcatagacgacctggaaggtcggacccatgatatcgccgatcatgtccaggaactgcgcttagatggagttcgccagtacaacgaagtcataaacgcgctgcaggacagctatcagaaccgcatgtccctgaaggacctcgacgcgcgcgtctccgaattggagcgcatcgtcgggctgcgcccgccgcccgcagcgtgagtctcgcataagccgctcaccggactgttaccaaaatgtaatagtcaattcttttctttcccttgaaaagccacattcggaactacaaataaatatcaccgacgcgacattgatcacgtcgagggtctgattgccggctcgtcccccgccgcattggacttggacaaaggcctcatcccctctccgggcctttgtcccctatttgaagccgccatagccttacctccgggctatggcggctttgtttttctgcactatctccagctgtatgaatatgaatgtctgtctttcaaagcatcgcatacgatttgttgcattgctcgtggctgggttttgcgcctaactgaaaaaatgggaacggaacgaatggactcgggagcctatctcgccagccagctggccaagggctttgcccgctcgctgcagcagcgcgcggcaaggttgggtttttcgccgggtcagtttccgattttgctggagctctgggccgaggacgggctgacgcagaagcagctgctgacccgcgtcgatatcgagcaggcgaccatggccaacacgctctcgcgcatggagcgcgatggcctgatcgagcgaaggccgcatccctccgacaagcgcgcccagctggtcttcctgacagacagggcaaggacgatggaaaatgacgctgtcgtggccgcccgtgaggccgatcttgctctgttcgatggcttcaagacattcgagcgcgagctgacgctggaatatatccgtcgcctgctcgaaaacgccaagaagctatgaggtttgagatgtaatcccggcgcgaaccgcgcccgggagaggggccggcgccttattcggcggcggcgagatagatctggttgcgcgaggcggcggccagagcctgcacgcgcgcttcggtcttggcgatcagctgatagaattcgtcctgtgcctcgacatcgagctgaatgacggcgttcacctcatccggcgtatcgcagacgcaggcgatggccgatatcgggcagataccaccaggataacgcttgccgttgcccgtataggcgcggcgaccccagcgctccgaatagacggtctcttcgcggtcgatctgcaggatcgtgcccttgcacgcggtcacgatgcccgccttgccgtaggcgaaccaatggtagttcaatttccgcaagatgtacttgccggtgatgtcttcgccggccagttcggcgggatcttcaatcatacggatcatgacgtcttccttaacgtgcacgtaatatccgctatctatgtttcagcttcaagacgaaaaggtcagcttttggagccacttagtcacaagttgtttcgaattcttacgaatttcgccactttttcgccgtttcggcgccatccggctcagccccggaacgcaacttccaggttctgcctgtcctgcgcgaccacgcggcaatgcgtttcgaagccttcgcccttgatcatgagcacgaactcggccgggattcccgtcgagctggagaccgagagagcagcactgtcggcgccgagcgagcggatcgtgcagtcgatcgtcgagcggcggtcgttgaacaggatcgagccggccttcagcacccgccggcgcgcgccgcttggctgatcggcgctcatcgattgaaagttgacgcagcgattgcggccgccgcgcttggcctcgtacatggcggcgtccgcctgcgccagaagcgtgtcgatctccttgcagacgatcgacagcgccgaaatcccgaagctcgccgtcaccgcgagcgcgccgaattcgccgacgatcggctcggccgaaatcgccagccgcagtctctcggcaatgacgagagcgccctcgcggtcgacattgggcaggatgatcgcgaattcctcgccgcccagccggccgaacaggtcgccgcttcgaagcaccgagcggcagatcgaggacaccgccttcagcacctcgtcgccggccgcgtggccatgcgtgtcgttgacggtcttgaagtggtcgatgtcgagcacgatgcaggcaaggcttttctggttgcgcagcgcaaggccgatcagctggtccgtctcttccttgaaggcgcgtcgcgtcagtccctcggtcaggctgtcggtcgccgccgattgcatcagctcgatgcggtccatggcgacgccagcaatctcctcaagaatggtgaggtccttgcgtccgaaggagcgcgccgtgcggtcgatggcgcagacggtcccgacggtatggccacttttggtgcgcagcggaacgccggcatagaagcgaacgtgattttcgcctgttacggcggggtgcgcggcaaaacgcggatcgcgcgtggcgtcgggcacgatcacggccgtgtcgaggtccaccacgaagcggcagaaggaatcctcgcgtggtacttcgctgttcgaaaatccggagcaggccttgtaccactggcggtgcgcgtcgatcagcgacaccaggccgacgtcgacggtgaacacttccctgatcagccgaacgatccgctcgaagccttcatcgcgcggtgaatcgagcaggtcgagctgctccagcgccgccaggcgctcgagttcccgctgcttcacgtccgcggaagacgtaccgaatgcgcgcgcaacaaccattgcaaacgtgctccccacctaagtccgtgtaggagatgcctcgcatataatcatgaacaaatgaatagtacgcgtccccgtttctcatcggtgaagggaggggcaggggtgtcaaggccgcgcatagggcctcccatccttgtgaacgaaccggccatcggcattcgcgctcatcatatcgatgtcggaacaggtggtgagatcggccatgtcacgcgagccgatttccagatagatcgccatcgcatcggaccggttgatcaggtgatggccgttgccggtattcttcggaaaggcggcgcaatcgccggcgcgaagcggggtctccccttcatcctcgaccagcaccacctcgcccgagagcacatagacgaactcgtcctcatgcgagtgccagtgccgctggctcgaccagtttcccggcggcaggtgcatcaggttgatgccgaaatcggaaagcccgccagcatcacccagccgctggcggatccgctcggcgcaggccgccgcatgtggctcggggtaaggcgagcccttgacgcgggctacggtggcgatgtcgatcttcggcatggggctatcctccgcattggtggctaggcggaccgcccgctcaaccgcccttcggtttcctcgtggccttcgtcatgttgagcgcgatcgccgctcgcacgagtgccgtaagggccggcgcgtcgatcgtgtctccttcgtggaagtcgatggcgcgccgggcattgccctcgaggctggcgttgaagaggccggagggatcgtcgagcgatgcgcccttggcgaaagtcagtttcaccgcggtcttgtaggtctcgccggtgcagatgatgccggaacgctcccacaccggtacgccgcgccacttccacgtctcgatcacctctggatcggcgtcccggatgatgcgccgcgcatcggccagcatcgcgccgcgccagtcggtcagctccgcgatccgccggtcgatcagccgcgatgcatcggcttcctcgcctgccgcacccttcgtcttctccgccattccatcctccccgatgataagcacatgcgaatactcggcaatctaggagattcgtagcgcaggggaagagggtttcctctgtctccgcctccatcgtcatgctaccaatcccccgggattcgagggtgaaatgaggaggttttttcatgacgcaggtgcctgccgccaattgggcggaaagctttcactatggtttcaaggactgccattacccgtcctcgcgcgaggaaatcagcgcgatcgtcgcgcggtcggcggcggtaaagacgctcggctcgcgccactcgttcaacgccatcgtcgatggcagctccgccatgtcgctcgagcgcctgccgatcgatcccgtcgtcgagagcaacggccgccaggtctcggtcgccggccactgcacctatggcgagctcgcgctcttcctgcagcgccaccagctcgccatccacaatctcgcatccctcccgcacatttcgatcgccggcgcgatagccaccgcgacgcatggctcgggcgacggcaacggcaacttggcgacggcggtctccggcctcgaattcgtcgccggcgatggcagcttggtgaaggtgaagcgcggcgacgcgaatttcgagggcatggtcgtgcatctgggcgcgctcggcgtcgtcacccgcgtgacgctggatgtccagccggagttccaggtcgcgcagcacgtctacgaggggctgagctgggatgcgctcttgtccaatctcgatgccatcatggcggcggcctatagcgtcagcgtcttcacgcaatggggcgagaaggccggtgccgtctggctgaaggaaacggaaaagagcggcaatcatcccgatgccctgcacggcgcggtcaatgccgacatcaagcgccatccgatcatcggcctagacgccgaaaacgccaccgaacagctcggcgccttcggtcgctggtcggaccggctgccgcatttcaagatgggtttcacgccgagcagcggcgccgagattcaatccgaataccacgtgccccgcaagcatggcgccgccgccgtcgaggcgctcttgtcgatccgctccaaattcgcgcatctcgtccaatcgggcgaactccgcaccgtcgccgccgacagcctgtggctcagcccgcagtttaatcgcgatacgctgtcgatccacttcacctgggttcgcgaccaggcggccgtcgatgccgccgccgccgagatcgagcaggcgctggcgccgttctcgcccttgccgcactggggcaaggtcttcacccgccaacatgtcggcaggaactacgcgaagctccccgacttcgcccgcctgcgcgaacgcatggacccggaacacaagttctccaatccatggctggaagaggtcgtcttcggcacgacgaactaagcgggactacacgacgcatttcgaccggcgttggcgctcgccgccgcgccggtatatgctgttgcgatcaagcaagggacgaagacgtcccggtatcgatatggagtagagattggcggtcgccttcaccaaggaagaaagcttcgaaacggcatcggaaacgctgatccccgatcggccgatctcgccgcatccgaacctcgtcaccgaggccgggttgaaggcgctggagctcaatctcagccaagcgcgcgaggcctatgaggcgacgttggggatcgacgacatcaacgagcgccgccgccagggtgccgcgccgttacgcgatgcccgctacttcgcggcccgcctcggcaccgcccagctcatgcccgcgcctacgtccagcgacaccgtcgccttcggcagcctcgtcaccttcgagcgcgaggacgggcgcgtgcagatctatcgcatcgtcggcgaggacgaggccgatccgaaggccggatcgatctcctacgtctcgccggtggcgcgtgtgctgatcggcaaggccgtcggcgacgtggtcgatgccggcggtcaggagctggagatcatcgcgatcgcgtgagcggggctttcaacgcgatcgacagccgcccgctgtccgccagcctgtcggcccgttcgttcccctcggtgccggcatggcccttgcaccatgaaaccgtgatcatcgttgatcgcgacagcgccgcgtcgatcgccctccacacatcggcatcggcgatgccacggcttctgagccggctattggcggtgatcttcctgaagccgttgttgcgccagatcggccgccagtcgttgcagcccttcacgacgtggatcgaatccgaccagatcgtcaccttcgcctccgctgcatggatgttggcccattgcgctgccttcagaacggcggtcgcctccatcgcattgttggcggtgccggctgcgccgccgcaagcggatgcgatctcgacgccgtcgcgatagacggcgaagccccagccgccatcacgcgagccgggctcgcagcagccatccgtgaagatctcaagcttttcgtgaacatcaatgctgcgcagggcgtcgggattatcggtcatgtcggcggcgaaacgtctgagagatcggcgggaaggcacagcctatccgaaacgcccgggtctgtcttccggccctgtctccgcccgcgacagaccggactatttcgccgtcgagatcgcctgcggataaagcagcaccgtcttttgcgccttctcatgtgcagacagatagctctcgcgcgccgccatcttcacgctcggctcgatgtccggcttgccgagcagcagcccctgcatctgctcgcagccctcgttggtgacgatctggcgttgcagttcggtttccacgccctcggtcaccacctgtatcccgaggctgtggcccagcccaatgatggcgcgcacgatcgagcgggcggccgcgtcatgttcgaggatgccggtaaagctgcgatcgaccttgatcttgtcgaagggcagcgccctgaggttggagagcgaggaaaagccggtgccgaaatcgtccatgacgatgcgcacgccgagacggtgcagtcgcatcagcgtcgagatcgtcgccttgcggtcgcggatgaaggcggcctcggtgatctccagctcgagccgttgcggcaggagcccggtctcttcgagaatggcggccacccggtcgtagaggttgggcagcatgaattgcaccggcgagacgttgacggcgatcgtcagcggctgcggccagcgcgccgcctcggtgcaggcctggcgcagcacccattcgccgagctgcacgatgatgccgctctcctcggctattctgatgaagacgtcgggctcggagcttccatgtcccggccggttccagcgcatcagtgcctcgtagccgctgatgctgccgctgcggctgtcgaggatcggctggtagttcacgaacagctggttgcgggtgatcgcgtggcgcagctcgttttcgatctcgcgccgcgccttgacggcggcgtccatctccgcgtcgaagaagcaggccttgccgcggccggcgtgcttggcgcggtagagcgcggtatcggcattgatgcacagaagctcgccggtatcgccatcggcggggtagaccgcgatgccgatgctgacgccgacggcggtcggatcgcgggcgacgtccatttcggcggcgatgcctgcaaggatcgcgtcggcgaggtcgcgcgcgccatccggctgcggcttgccgctctggatgatcgcgaactcgtcgccgccaagccgcgcgatggtggcgctgtcgtcggccacgcgctgcaggatcgaggagaccttgcacagaagacggtcgccctcggcatggccgaacaggtcgttgacggccttgaagcgatcgaggtcgagatagaagacggccgcctgcgcgtgcttgcgctgcgccacctggatcgcctgtctgagacgcgtgtcgaagagagagcggttcggaaggccggtcagcacgtcatgctgggccagatgctcgatcatctgctcggcgcgcttgcgctccgtcaggtcgcgcaccgccaggatatcgcagctgcggccgcgatagatcatccgccgcgccatcagttcgaccggcagttcggtctcgccatgggtggtcagcagcgtttcgtgatgcgtgccggatgccagtccgcccgcaggcagcagcaggaagtccggtttgcggccgcgcaattcgccgagctgccagccggacatctccagaaagcgctcgttggcgtcgaggatcgttccctcgtagatcaccagcagcccctccatcgtggcgttcgccaggcccttcaggtcggtcaggtggctcgccaggaaaaccgtgccgagcgaagccaggatgagcgccgtcgagaccgccatgacgatggccgccagcgtcctcggctcgacgatcgccgccgtcacctgccgtccaggctcagggatcagggtgatgtagctcatcgacacgaagtgaatgatggcgatcgccagcaccatcgacgccgccgacaacagcacgcgcttggcgccggagagcgagcggaagatcaggaaggccacgccggcgagcgccgcgccgatcgcaagcgccgacagcgtcgccatggcgttgaagcgaatgtcgacctggccctcgaccgcctgcatgccggtgatatgcatggcggtgatcccgagcgccatgagcacgccgccgagcgcgacggcgaaacggctggcgccttcggtggcgacgagcagtgccagataggacacgccgatggcgatcacgaccgagagcgtggtcagccccagcccgtaggcgatcgcatagccgctgtcataggccagcatggcgatgaaatgcgtcgcccatatgccgacgccgatggcgaatgccgaggccatgatccagttgcgctgctgggcgcggtcgcattgctgggcccgaaagagaagcagcatgccggtgaggttgccgatgaggcagataacgacggcggcgatgatcagccgccagtcatgattgtcgcgaatacaggcgatcacggtaaacatcagccacctccaggcaccaattgccgaaggttatcaagcgtcttcttaaataaccgtaaattgcaaattgaggattctccccgcgttcagcgtgcgttttcgcacagtcgcgcacatgccccggcctcgctttttcaactcgaaagcggaccggctttggtctatcgtccggcaaaaatttgaagaaggagtcggaaatgcctgacctgatgccggttctcgcgcgcgcggaccagaatttgccctcgagcctcgacaagctgttcgagctgttgcggatcaagtcgatctcgaccgatcccgcctacaaggatgattgccgcaaggcggccgagtggctggtggattatctccgcgacatcggtttcgacgcctcggtgcgcacaacccccggtcaccccatggtcgtcgcccatcacgacggcgccgcgccgtcggccccacatgtgctcttctacggccactacgacgtgcagccggtcgatccgatcgagctctgggacaacgatcccttcgagccctccgtgcaggaagcagccggcggccgcaagatcctgaccggtcgcggcaccgccgacgacaagggccagctgatgaccttcgtcgaagcctgccgcgcctacaaggacatcaacggcgcgcttcccgtgcgcgtgacgatcctgttcgagggcgaggaggaatccggctcaccatcgctgaaacccttcctcgaggccaatgccgccgagctgaaggccgattacgcgctggtctgcgataccagcatgtgggaccgcgacacgccggcgatcgccgctgcgctccgcggcctcgtcggcgaagaggtggtcgtcaccgccgccgaccgcgatctgcattcgggcctcttcggcggtgcggccgccaacccgatccatatcctgaccaggatcctcgccggcctgcacgacgacaccggccgcatcacgctggatgggttctacaacggcgtcgaggagacccccgcgaacatcaaggcgtcctgggaaacgctcggcctcaccaccgagggctttctcggcgaagtcggcctgtcggttccctcgggtgagaagggtcgctcggtgctggagctcacctgggcccgcccgacggccgaggtcaacggcatctggggcggctataccggcgagggcttcaagaccgtgatcgccgccaaggcgtcggccaagatttccttccgcctcgtcggcacgcaggacccggacgccatccgcgacagcttccgcgcctatgtgcgctccaggctgcccgccgattgctcggtcgagttccacccgcatggcggttcgccggccatccacctgtcctacgattcgcctgtgctcaccaaggcgaagacggcgctttcagacgaatggccgaagcccgccgtcgtcatcggcatgggcggctcgatcccgatcgtcggcgacttccagaacatgctcggcatggaatcgctgctcgtcggcttcggcctcagcgacgaccgcatccattcgcccaacgaaaagtacgagctgacgtcctatcacaagggcatccgctcctggatccgcatcatggaagcgctggcggcgtaatctgcgtcgatgaaatgaaaaaggcgcaccgattttcttaggatcggggcgccagaggaacaaaaaggccgggttgaaaccggcctttcgtcattcgcttcgcatcagtgccagtacatccgtggtcaaggtgaaagcgaatattgcagccagactgcccgcgaaaggttaacggagcgttaacgataatctcgcgataggcaggtcggttctccatgcgctccatggtgcggcttggtgatcgacgactgcatccgatgaccgggatatcgtgatcccgccgccgcatttcaaggcctcgcctctcgagccgttcaagctgcgttcatccgtgcctgctataagtcattgaaacaaaagttgaatcactctcgccaaactttggccgggaagctgttcactgttgtcctgagaaggtgatgagcccggaagttttcgaggaacggcgtttcggccgctctatctagggagtgcaagcgtgaagaccacactgatgaagataaccgccgtcgcggccttgctgctggccccggtcgccgctcaggccgccgaaggcttcgcgaccgccaacgtcaacatgcgcgccggcccgagcacgcaatatcccgccgtgaccgtcattcccgccggcgaatccgtgcagatttatggctgccttgccgatgtgccctggtgcgatgtcgagttctacaacggtcgcggctgggtcgccggccgctacgtgcaggcgctctatcagcagcgccgcgtctatgtcgatccgcaatattatcgtccgctcggtatcccgacggtggtcttcagcgtcggcaattactgggatcgctactaccgcgatcgatccttctacggtcagcgcgaacgctggcgccgcaatccggtctatgaccgcccggccgccgtgcgcccgccgcccggcccggaattcggcaatcccggttacaacaacggccgcccgcgccccggctacgacaatgatcggccacgcccgggcttcgacaatgaccgtccgcgtcccggcttcgacaacaaccgcccgcgccctggcttcgatgccggtccgggtcgccagcccgatttcgaccgtggtcccggtcgcggaccggacttcggtcgcggccccgatccccgccaagatcctcgtcaggacaatgacggtcgtccgccgcggttcgacggccgcgccggcatgcccggacagccgggccaaccaggccagcccggccggcgtggcgagggcggtcacgggggccagggaggacagggcggccaggccggtcagcccggtcagcccggacagccgggcttcgatcgcggtcccgaccgtcgccgcgaccaggatcgccgcccgccggtgtgccagccgggtgatccgaactgcggtcagaatccccaatagtgaaccggcggcaatgagccgtcagcgatgatggcaagggcgatcgaaaggtcgccctttctgctttcacgcatcttgaggcatggaaaagcccgacgctcctgagagacgccgggcctggattcgatcggctcgtgttgaggggagacggccgatctgccgcgaggcgtgttgcctcgcttggtaggaaatgggcgaaagcgcaaatggttccgcgctgcaatccggaagttgtcttttctccgggtgccatcggctcgtccatacgaaaaaggcccgcgacgtgcgggccttcggagatatgtcgtgccgccggtcagtagcggtagcgatagccgtcgcgggcccagggcgggggcgggcggtagccgcgatcgtcgcgccagccgtaacgctgctgcgggcggtggccccagccgtagtcacgctggtagcggcgttcgtagcggggtggcggcgggcggcgccagttcggccggcactcaccccacggggtgacgtgaaagccacggccgcaggcgtaatcgaccttgacgacattgttggtcgcgccgcttggcacggcgcccgtgggcatggcttcggcaaccgtggtaccaagtccgaccagggcgaccgcgatcgcgataattgtcttgcgcatctctgcacctcattccttatgcaagtcccttgcatgtggattagagggccgttcgggtgaatggaagctgaaccaaccaaggcattattgcggcggacggaaaggcccggcctcaagccgggaaaacgctgcccgcaaaagcttttgcctttggctaacgaggccttaactcccccttaaatcgccgcatttaaagttcaaccgggtaaggatgcgaccagcgtgatgcggtcgccacggtcatccggcttgggccatggccgtctgtttggggcaaacctcggtttgcgattgaagcgaggttcagcgggcgtaaatggcgggcaggggcagatcaggcgatagaatcgaaccatccttcagcggccgcgagcgccgcgacgatggcgacgatttttcgctcggcgccgatgaccgcgtcgccggcggcggacgccccgccaagcgcgccgcgcccaagtccagcgcctcgagatccgagcgccgcgatccgccctcgcggcgcgaacccgattccgcccgctatgacgacgattacgacgacgagccgcgctaccgcgagccgccgcgccgccgctcgggcggtggtggtggcaatggtggcaagcgtcggcggccggagcgcgagggcctcggcgtcttcggtctcgtccgtcgcatgctctactggtgcatcgtgctcggcatctgggccggcatcggcgtgaccgggctggtcgtttactatggctcgcgcatgccgagcgccagcagctgggaaattcccgcccgtccgcccaacgtcaagatcaccgcggtcgatggcagcgtcatcgccaatcgcggcacgacgggtggcgaggcgctggcgctggaagacatgtcgccctatctcccgaaggcgatcgtcgccatcgaggaccggcgcttctattcgcatttcggcgttgatccgctcggccttgcccgcgcggtcgtcaccaatctgacctcccgccagatggtgcagggcggctcgacgctgacgcagcagctcgccaagaacctgtttctctcgcccgaccgcacgctggagcgcaaggtccaggaagtgctgctcgccttctggctggagcagaaatacaccaaggagcagatccttgcgatgtatctcaaccgcgtcttcttcggctcgaacgcctatggtgtcgaggccgcctcgcggcgctatttcaacaagtcggcgcgcgacctgaacctcggggaggcggccctgcttgccggtctcgtcaaggcgccgtcgcgtctgtcgccggcgcgcgatccgcaggccgccaacgaccgcgcccaggtggtgctgcaggccatgcgtgatcagggcatgatctcggaggacgaggtcaagaccgcgatgtcgcagaccccggccaaggccaagcgctactgggacggtgccggccagtatgtggccgacatggtcatggacgagctgccggcgctgatcggcgacgtcaaggaagacatcatcgtcgacaccaccatcgacaagacgctggaaaaacgcgccgaacagtcgatcgccgatgtgctcggcaaggaaggcgccaagctcgacgcctcgcaggcggcgctcgtctcgatcgacggcaccggcgcgatccgcgcgctggtcggcggccgcgactatgccgaaagccagttcaaccgcgccgtcaaggccaagcgccagccgggctcctcgttcaagcccttcgtctatgccaccgcgctcgaaaaggggctgacgccgttttccatcgtcaacgacgcgcctgttcgcatcggcgactggacgccggaaaactacgagaagaagtacaatggcgaggtaacgctggccacggcacttgcgaaatcgctgaacacggtggccgcccagctcgtcatgtatgacggccccgatgaggttatcaagctcgcccgccgcctcggcatccagtccgacatgcagcccaacgcctcgatcgcgcttggcacgtcggaagtctcgctcaccgagatcaccggcgcctacgccgccttcatgaatggcggctacaaggcgacgccgcacgtcatccgccgcgtcaccaccgccgatggcagcaaggtgctctacgaaaacacgtacgacaacccgccgcgcgtgctctccgaaaccattgccgccaacatgaacgccatgatgatgggcgtcatcgaccagggcaccggccgcagcgccaggcttcccggctggcaggcggccggcaagaccggcacgacgcagaactcccgcgacgcggtcttcgtcggcttcaccagcaacctgacgacgggcgtctggttcggcaacgacgacggcaagccgatgaagaaggtcaccggcggcggccttcccgccaaggcgtggcaggaattcatggtcgcagcccacaagggcctgtcgccggcaccgctcttcggcaacggccagttcatcaatccggcgcctcagatggacaacggccagccgatggcctccgccgatccgaatatgcccggaaacatgcaaggaaacatgcccggaaacatgcaggctgacggtatgcagggtggcatgcagggcggcgacatgaccggcgcgacgggtggcatgcagccgccggtcgaggaacggagcaccatcggcagcatcatttcgggcgtgttcggcggctccgaagaggggcggccgcgctacaggcaggaagagtatccgcaggcgccggtgcgccgtggcggccaagagcaggcacccgtttatgatggtcccgtaccgcccgccgatgtcgccgaggacggccgttacggctatggcaacgcgctgccgccgggcgacgtcggcggtggcccgccgcgccaggaataccagccgcgccgcaccacgcttctcgacctgatcatggggcaataaacgcttcgccgcgcaacaaaaaacgtgccccgaggcggacggtgaaaattaattgccgttggcttcttttgctggttttcaggacatttcccgccttgcagtcgcgaaaacccgtccttatatacgccgcatcaccgcaatcacgattgcgtcaaacgtagagacccatcccgtaaggggctgtcatcgaaatgccttcccggggttcagacagcttgcttcaaggagtaaatgacatggcaaaagtaattggtatcgacctcggaacgacaaattcctgcgtcgctgtcatggacggcaaggacgcaaaggtcatcgagaacgccgaaggtgcgcgcaccacgccttcgatcgttgcattttccgaagatggcgagcgcctcgtcggtcagccggccaagcgccaggcagtcaccaaccccacggacacgctgttcgcagtgaagcgcctcatcggccgccgctacgacgatccgacggttgaaaaggacaaggctctcgttcccttcgagatcaccaagggcgacaatggcgacgcatgggtcaaggcccgcggcaccggctattcgcctgcccagatctccgcgatgatccttcagaagatgaaggaaaccgctgaatcctatctcggtgaaaaggtcgaaaaggccgtcatcaccgttcccgcatacttcaacgacgcacagcgccaggcaaccaaggatgccggccgtatcgctggcctcgaagttctgcgcatcatcaacgagccgacggcggcagcgctggcttacggtctcgacaagaaggacggcaagaccatcgccgtttacgacttgggtggcggtaccttcgatatctcgatcctcgagatcggcgacggcgtcttcgaagtgaagtccaccaacggcgataccttcctcggcggtgaagacttcgacatgcgtctcgtcgaatacctcgttgccgagttcaagaaggacaacggcatcgatctgaagggcgacaagcttgctctgcagcgcctcaaggaagctgccgaaaaagccaagatcgaactctcctcttcgcagcagaccgaaatcaacctgccgttcatcacggccgatgcgaccggtccgaagcacctgacactgaagctgacccgcgccaagctcgaaagcctggtcgacgatctcgtccagcgcaccatcgcgccgtgtaaggcagccctcaaggatgccggtgtcacccccgccgagatcgacgaagtcgttctggtcggcggcatgagccgcatgccgaaggtgcaggaagtcgtcaagcagctgttcggcaaggagccgcacaagggcgtcaacccggatgaagtcgtggccctcggcgccgccatccaggccggcgttctccagggcgacgtcaaggacgtcctgcttctcgacgtaacgccgctgtccctcggcatcgaaacgctgggtggcgtcttcacccgtctgatcgagcgtaacaccacgatcccgacgaagaagagccagaccttctcgaccgcagacgacaaccagcaggccgtcaccatccgcgtgtcgcagggcgagcgcgaaatggcccaggacaacaagctgctcggccagttcgacctcgttggcctgcctccggcaccgcgtggcgttccgcagatcgaagtcaccttcgatatcgacgccaacggcatcgtgcaggtttcggccaaggacaagggcaccggcaaggaacagcagatccgcatccaggcctccggtggtctctccgacgccgacatcgagaagatggtcaaggacgccgaagccaatgccgaagccgacaagaagcgtcgcgaaggcgtggaagccaagaaccaggctgaaagcctgatccattccagcgagaagtcgctgaaggattacggcgataaggtcaccgaagccgatcgcaccgcgatctccgacgcgatcgccgccctgaagacctccgtcgaggcaaccgagccggacgcggaagacatcaaggcgaagacccagaccctcatggaagtctccatgaagctcggtcaggcgatctacgaagcccagcaggcggaagccggtgcgggcgacgcttcggccgaagccggcgacgacaatgtcgtcgatgccgactacgaagaagtcaaggacgacgaccgcaagaagtccgcgtaagcggctcgcggcggtcacgtttgaaactgacattccggctgctcaccatggcagccggaaatccatttccggggtctgatccttaatggcaaaagccgatttttacgaaacgctgggtgtcgccaagacggttgacgaaaaagagctgaaaagcgctttccgcaaactggcgatgaaataccatccggacaagaatcccggtgatcataccgccgagcacaagttcaaggaaatcaacgaagcctacgagacgctgaaggacccgcagaagcgcgcggcctatgaccgctacggtcacgcggccttcgagcatggtggcatgggcggcggtggcggcggtttcgccggcggcggcttctccgatatcttcgaggacatcttcggcgagatgatgggcggcggccgcgcaaggcagcgctcgtcgggcggtcgcgaacgcggcgccgatcttcgctacaacatggaaatttcgctggaggaatccttcgccggcaagacggcgcagatcagggttccgacctcgatcacctgcgacgtctgttccggctcgggcgccaagcccggcacccagcccaagacctgcggcacctgccagggctccggccgcgtgcgcgccgcgcagggcttcttctccgtcgagcgcacctgcccgacctgccatggtcgcggccagatcattcccgatccctgcggcaagtgccacggccagggccgcgtcaccgaggagcgctcgctctcggtcaacattcccgccggcatcgaggacggcacccgcatccgcctgcagggcgagggcgaggccggcatgcgcggcggcccggcgggcgatctctatatcttcctgtcggtcaggccgcacgaattctatcagcgcgatggcgccgatctctattgcgccatcccgatctcgatgacgacggcggcgcttggcggcaccttcgacgtggcgacgctcgacggcaccaagtcgcgcgtcacggttcccgagggcacccaggccggcaagcagttccgcctgaagggcaagggcatgccggtgctgcgctccagccagaccggcgatctctacatccagatccagatcgagacgccgcagaagctctccaagcgccagcgcgagctgttgcaggaattcgaggagctctcgtcgaaggagaataatcccgaatccacgggcttcttcgcccgcatgaaggaattcttcgagggttgattgaatattctagtaaaaattcgagagcccggttgttcgcagccgggcttttctgttttgcatagggataagcatattttttgctaccgaagagactcgacaattctattgccagtccctttattagatatgtagcattgtttctgtattgagcctcgaaaaggttctagacttgcattccctttggtagcctgtgccgaggttgatttggaacgccgtctcgcagctattcttgcaatggatatcgtcggctacagccgaatgatgggtgccgatgagcaggggaccttggatgcggtcaagctctgccgtggcgaggtcatcgatcaaaggatcgcgcatgcgcgtggccgcgtggtcaagcacaccggcgacggcatgctggtggagttctccagcatcgtcaacgcggtgtcctgcgccaacgacgtgcagcaggcgatggcggcccgcaacacggcgctgccggaagagcgccgcatcgagttccgcatgggcatccatctcggcgacgtcatcgtcgaggacaacgacatcttcggtgatggcgtcaacgtcgcggccaggctggaggcgatctgctcgcccggcggcgtggcgatctcggcgtccgcccgcgatcatgtcggcagccggctcgatctgtcgttccaggatctcggcctcttcacgctgaagaacatcgagcagccggtgcaggtctatgccatctcgccgaagcgcgctctgccgctcagggtcaacgcggcggcactcgccgcggccaaggagaagcagaagccgctggtcgcggtgctgcccttctccaacatgagcggcgatcccgagcaggaatacttttccgacggcatcaccgaggacatcatcaccgatctgtcgaagatctccaatctctacgtcgtcgcccgcaacaccgccttcacctacaagggcaagtccgtgcaggtgaagcaggcggcatccgagctcggcgttcacttcgtgctgcagggcagcgtgcgcaaggccggccagcgggtgcgcatcaccggccagctgatcgacgcgcgcaacggcgcccatctctgggccgaccgcttcgaccgcgatctgaccgatatcttcgccgtgcaggacgagatcacccacgcgatcgtcgaccagttgaagatcaagcttttgccggaagaacaggaagcgatcgccgccgagccgaccaccaacgtcgaggcctacacctattatctgcgcggccggcagttctcgcactcctggacccggcattacctgctgatggcgcgccgcatgttcgccaccgcggtcgcgctcgaccccgattacgccgaggcctatgccggcatcgccgattgcgaatcgacgctgcgcgactggcatgccggcgaatacacgctgaagggcattctggaattgaccgccaaggcgctggcgctcgaccccaacctcgccgaggcccatgcctcgcgcggcctggcgctgcatcaggacggccgcgacggcgaggcgctggtggagttcgaaaaggcgctggcgctggagcccgatctctacgaggcgaatttccactacgcccgcttcctgttcatgcagggcaagttcgagggcgccgtcaccttcttcacccgcgcctgcgagatacggccggacgactatctgtcgccgatccatctgacgagcgcctgccgctctctggggctctcgcgcgagcatgagcactgggccagggtcgggctggagcgcgccgagcgggcgctcgagctgcatcccgaaaacgccggcccggcgcatcgcggcgcgctggcgctcgcccatatgggccgcttcgacgaggcgcgcgaatgggtcaagcgggcgcaattgatcgaccccgacgatatcgtcgcgcagtacaacgtcgcctgcgtccacgccctgctcaacgaatgcgaccaggcgctcgatatcctcgaagcactgctgccgcagtcgtcctgctaccagatcctctggttcagccacgattccgacctcgacgcggtgcgcgggcatccgcgtttccaggcgatgctcgacgccatcgcggcctgcaccttccatcaggacgggttccgcgtcgcatcggagtaacgctaaggtagagtgcgttcgcccgggcgcttcatttcgagacaggggtgcgccgtcgcaacattggcgttaacgcaagcaatcgaagtcgctttgcagcggtcgcgaatatattcaatatgctcgaaggggaatacaccacattacaccgagagcaacttccatgacggtagccgctttgtcttttcagtctgatgacgtcgatgtactcgcgggcgcgctgtacacctggtgcgccgagcgcaatatcaagctcttgagccagcagggtctgtcgatcgccagcatcgcgatcgatctctatcatgccggtcatcagacgcaggatcagctgctggtcgctctgcacgactgcgatattcactagataaccgccctacgcggtcgctcgtcgcgtcgccccgaaaatctcaggcgtagacgtcgtcacccgacatcagcgtcacgatggtcttgacggcttcccggccttccggcgagcgcagcttgtcgtaggtcaccgcaagctcgtaggcctcggcgctgaggcccggccgcgccgtcgtgtcggcaccctcgaacagcgccgaaatatcgacgccgaggaaaaccgcgatctgatgcagcttgctcgccgagacgcggttggtgcccttttcatatttctggatctgctgaaacgtcagcccgagcgcctctccgagttccagctgggagatgcgtcgcttggcgcgcagcgtccggacgttctggccgacaataatatccaccggatctggcactttgagtgttcccgttcatttcattaattttgtctgagcactatgcagaggtttttaaatatctcaacccaagatttgcaaatttcaaccagcttttcggctgatttttaggctgttttcttagttaaagaagatgaaatatacctgagcgtgcataaaatacataaagctagtttacggatgtggcgcggttactagtgggcgctgcttttctctctcgctgaaaattctctcgccatggatgaggcattccgtccgtccgggacggcagcttggacttgaccaccacgtccgtgaagcctattttagaattattctaaaagaggccatcatgctgaaacgaattttcagatcacccaaacgttccttcgacagtctgtccgagcaggagatcctggcgctcgccatcggctccgaggaggacgacgcccgcatctatctcgcctatgccgacaggctgcgcgccgattatcccgcgtcggccaaggtcttcgaggacatggcggacgtcgaaaacacccaccgcaactcgctgatcacgctctaccgccagcgcttcggcgagcgcatcacgctgatccgccgcgagcatgtcgaaggcttctacgagcgcaagccggactggctgcgcgccaacctttcgctggagaagatccgccaggaggccgaggccatggaaaaccaggcctaccgcttctacatcgaggcggccggccgcgtcggtgatgcctccacgcggcaactgctcggcgacctcgcccttgccgagcaggggcatgaggacatcacccgcatgctcggcgacaggcacacgccggaagacgtccgcaaggaagaggatctgaagagccgccggcagttcgtgctcacctatgtgcagccgggcctcgccggcctgatggatggctcggtctcgacgctcgcgccgatcttcgccgccgccttcgccacgcaggatacctggcagaccttcctcgtcggcctctcggcctccgtcggcgccggcatctcgatgggcttcaccgaggcggcgcatgacgacggcaagatttccgggcgcggctcgcctgtgaagcgcggcctgtcctgcggcgtcatgacggcgctcggcggcctcggccacacgctgccctatctcatcgccgatttctggacggcgaccacgctggcggtcatcatcgccattttcgagctctgggcaatcgccttcatccaaaaccgcttcatggaaaccccgttcctgcgcgccgccctccaggtcgtcgtcggcggcggactggtgctgggcgcgggcatcttgatcggcagcggctgacgcggaaacgaaaatggccggcatcgcgccggccatcgaacatttcggtctccgaaaatcctggtctagcgcagcgcgccgaccagcacgtcgcggccgttctcgatggtgacccaacggccggcattggcgctcgactggcgcttgatgaaggagtagggggcgtcgtaccaaggcttcaccgtcgcggcgagattgtcgagcacgaagtcgcccttcgtcgtgcgcagcgtcagcaccgcatggccttcgccatcgggcttgcgaagcacggtcatcagcagatttgagggagaaaagccgcgctggatcaggatgcggcgcttcagcagcgcatagtcctcgcaatcgccggcggtcgtcggatacgcccagacttcttccttgccgtagatgtccttgtcggtcatcggagcgatcgtggtgttgacgctggtattgatggcgcgcaccagcgcccacttggcgtcggtcatctccatcgggccgacattgcggttcggcccgcactcgttgccatgcgactggcagaattcgtaatggccgatcggctgcgatgtcgcctggccggtctccatccagagtgtgttggtcgctgccggcatcgccgcgctcgacatcgcaaacaaggccatcatggccaagagcaaacccttgatacgcacgcccgctgtcccttgcatcgccccatatttattaacaaaaagttaatggaggcggccgctcggagtcaatcactacttctggcgagggggcgggaagcggtgaacatggttaaaatgcgttaggatttggcacagtgccgcgcgccgggcgcgctcgcccggcgtggcgtgttttcgacaaattgttgaaacaaatcgatattctcaggtcagtcgatgcggtttccggttcgggcctcagcggacgagcgatttcaccgccgaaagcatgcgctcgatgtcctgtgggcgcgacaggcggtggtcgccatcacgaataaatgtcagcaccacgtcgtcggctggaagatgctcgatcagcgtcattgcgtgactgaagggcacgtcggggtccttcatcccctgcaggatgtgaaccgggcatccggtctcgatcatcccactcaaaacccggttgtttcgaccgtcctcgatcagcgcgcgggtatagatgttgggttccgggctgtattccgaaggctcctcgaagaagccgcgctcggcaagcgaggtcttctccttctcggtgaggttcggctcgatcaatacctgcgtgaaatcgggcgccggcgcgatcagcaccatcccgtcgagttttggcgcgccggttctcgccgccaattcctgcgccagcctgagcgcgatccagccgcccatcgaggagccgacgaggatgatgcgttccggctcgagatgggaaacgacggccatcgcctcctcgagccagcgcgagatcgtgccgtcgcggaattcgccgccggacaggccgtggccggaataatcgaggcggatgcaggcaagcccgttctcggcggccatccggtcgagctcgacggccttgctgccgctcatgtcggatcgatatccggataaccagaccagcgtcgggcccgctttgtcgccggcagcagggcgggcgatataggcgatctcccgcgccgccgatccctcgccgacggtcagaaattggtgctgcggggcgatattggcgtcggacatggcggaactcctttgtttcagcctataaaacagattcttgacaggctgacagcaggtgatttttccgctaaagcgtgctaatgacttcgttgcagcgatggcgaaacacggtcgtcctccttatatagaggcgatccgctgcagcaatccgaaacaacgcgaggagaatacgaccattcgcagaccgtttaaagccgacgcgcccgtgaaggatgggccgcgctcgaacagggaaattcgcattcccaaggttcagctgatcgatgctgaaggacagaatttgggcgtcgtggcgaccgaccaggccctgagaatggctgaagaagccggactcgacctcgttgagatttcccccaatgccgaaccgcctgtgtgcaagatcctcgatctgggcaagctgaaatacgccaaccagaagaaggcggccgaggcgcgcaagaagcagaaaatcgtcgaagtcaaagaaatcaagatgcgtccgaacatcgacacgcatgactatgacgtgaagatgaaggcgatgggccgcttcttcgaggaaggcgacaaggtcaaggtgaccctgaagttccgcggccgcgaaatggcccaccaggaactcggcatgaagctcctgcagcaggtcaaggccgatacgctggagctcgccaaggtcgaagccgagcccaagctcgagggacgccagatgatgatggtgctcgcgccgaaataaggcgcgtcgccaccgttcgtatcaaagccgtccgcgagggcggcttttgtattttcgccctggtatggcgggcaatcgacgcccaaggggcggggcgatgcgctgctgaaaagattccggcccgtgccccgttgcactttcatgacactgcggttataagcgcgcgtccgaactgaccggcagggcatgccgtggcagtttcgaatgcttgcggcacggttcgtcaccgtgaccgcagatcaacaacaaacgctcccgcacttgttgcgacacccgggaaaccgggatcgcgagaaggcttcttttgaagcgagcctcttgcaggccaggtggggggatcagaaacggagtagcaaaatgcccaagatgaagacgaagtcctccgccaagaagcggttcaagatcaccgcgaccggcaaggtcaaggctgcagccgctggcaagcgccatggcatgatcaagcgttccaacaagttcattcgcgatgcacgtggcaccatggttctggcagaaccggatggccgcaaggtcgtgaagaattacctgccgaacggtctctaagactattccgcgaacgtatagattaaggagatcatgatatggcacgtgtaaagagaggcgttaccgcccacgccaagcacaagaaggttctgaagcaggccaagggcttctacggccgccgcaagaacaccatccgcgccgccaaggctgctgtcgatcgttcgaagcagtacgcttaccgcgaccgcaaggtcaacaagcgtaacttccgcgccctctggatccagcgcatcaacgctgccgtccgcgaattcggcctgacctacggccgcttcatcgacggcctgaacaaggctggcatcgaagtcgaccgtaaggttctctccgacatggcgatccatgagccggaagcattcggtgcgctcgttgctgcctccaagaaggcgctcgagtacctgaaggacgctggcacgaagaacgagtttgaagcagccgtcaactaagccggcgctattcgaaccttcgcttcgatgatttgaaacccgcgctggcaaggcttgcgcgggtttcttcgttttaccgggatgggagcgcctataggggcgaacgatcaagacgtggcgaacgatgtgagacatccgacgatggatcgcgacctgcttgccaggagcgggctgagcgaggaggacgtgcccgttctcatcgcggccctgctgcgcggttccaagcgcgtcgagcgtgtcgctctgtcgggcggcgccgtctggatcaagcgctatggcaccgagcgcgcctcgcgctggatggtgctgcagcgcatgctcgccaatctcatcagcgcgccgtttctgcgcccgtcgccgattctggccgacgagggcatggccgggcgcgagatccgtcgcctcgcccagttttcttctcatgacgtgccgaccgcgcgcgtgatctattcctcgggcgccgccgtcgtctttagcgatgccggcgatacggtcgatcgccagctccatcatgtgctgaacaacgacccggtggcccacgacgacatgcttgtccattgcgccgccgagctcggccggctgcatgcgaaggggctgtgccacggcaggccctatccgcgcgacatgttcctgaaggacggccgcatcggcttcatggatttcgaggaggagccggaccgggtgatgccgctggaggtcgcccaggcgcgcgatatctggctgctctttttgcaggtcgcgacccgcgccaagctcggcggcgaaacccacgaccgggcctacagggcctgggccgaggtggcgccaccggcggccgttgccgaactgcgcaagcttaccggctttctcggcggctttttgtcggctgcccggttgattggccgcgtccacatgggtagtgatctgcgacgtttcatcgtggcgaccagctatctgaagcatgtttcgtgaagtgtccctcaaagaccggacgccctgaaggcaggaaaagatgaccgaactcgcaaccctggaaaagcaactcctgtccgatgtcgcggccgccgccgatgaaccggcgatcgaagccgtgcgcgtcgcggccctcggcaagaaggggtcggtctccgaactcctgaagacgctgggctcgatgacccctgaagagcgccagacgcgcggcgcccagatcaacgcgctgaagacggtggtgaccgaggcgatcaacgcccgcaaggccgatctcaagaaggcggcgatcgacgcgcggctgaaggccgagacggtcgacgtctcgctgcccgtccgctcctcgcccgccgagcgcggccgcatccatccgatcagccagatcgtcgacgagatcaccgcgatcttcgccgacatgggcttctcgatcgccgaaggtcctgacgtcgagaccgattattacaatttcacggcgctgaacttccccgagggccatccggcccgcgagatgcacgacaccttcttcttcaacccggatgagaacggcgagcgcaaggtgctgcgcacgcacacctcgccggtgcaggtgcgcaccatggaagcgcaaaagccgccgatccgcatcatcatccccggcaagacctaccgccaggacagtgacgcgacgcactcgccgatgttccatcaggtcgagggcctcgtcgtcgacaagaaggccaatgtcgccaacatccgctgggtgctggaagagttctgcaagaccttcttcgaggtcgacagcgtcaccatgcgcttccgcccgtccttcttcccgttcacggagccgtccttcgaggtcgacatccagtgcgaccgctccggcccgatcgtcaagttcggcgaaggcaccgactggatggagattctgggctgcggcatggtgcacccgaacgtgctgcgcgcgggtggtcttgatcccgacgagtaccagggctttgcctggggcatgggcctcgaccgcatcgccatgctgaaatacggcatgcctgacctgcgcgacttcttcaacgccgacgtccgctggatgacccactacggcttccgcccactcgacatgccgacgctgttcggcgggttgagcgcgtaagccaatgccaaccgtccttcgcttcgaccagtcgaggcgaaggggtttaacgcgggtgacctcaagcgtatcatggaggtcgtcgaagatcacaaggaccagtttgtggaggcatggaatgaattctccaagtctgtatcctgataacgagcggcctgtggaggcctggtgcgacccgcacgatcttcacgtccggcttgccgacggacgagcggtgaaaaccccgctctggtggtatccccgccttctgacggcgtcgccggccgagcgcaacaatgtcgagctcacgcttgcgggcgttcactggcctgacgtcgacgaggatttgtcgatccggggcatgctggcggggtggaagtatcccgaggctagggctccggaaaaggcggcgtagaccggacgatgccgaccttgctcatctggcatggatacaggttcaggttctacgccttggatgtcggcgaaccaccgcatgtccatatcgtcaaggatggcaagtccctgaaggtgtggttgaagagtttggaagtcgagaagaacaaagggtatagtgatcaggagatcgcaaggctgctcaaggtagcctccgagcaccgggacgaatggataggcgcgtggaatgaattctttggcctttgagaccgacgatatgcgacccgttcgcgcttggtgcctcgatggcgaggttcacgtcgcgctcgcggatggtcgcgccatcgccacgcctatctggtggtacccgttcctgtccgaacttgatgacaaggcattgaacgacatcgaattgatgtacgagggtatctggtggaccgccatcgacgagggtatttcggtgaaaagcatgtttctgggcataaaggcccccggcgccaaggctccggagaaggctgcgtaaccgaacgattgatgatttttgagacgagaacaacacaatgaaattcacgctttcctggctcaaggatcatcttgagaccgacgccacactggatgaaatctgcaagcgcctgaccgagatcggcctcgaggtcgaggatgtcgacgacaaggcgacctacaagcccttcgtcatcgcccgcgtgttgtcggccgaaaagcatccggaagccgatcgcctgaaggtgctgtcggtcgatgccggtcccgatatcaacggcggcaagccgctgcagatcgtctgcggtgcgccgaacgcgcgtgccggcctggtcggcgcgctggcgcggccgggcgattatgtgccgggcatcgatgtcacgctcggcgtcggcaagatccgcggcgtcgaaagccacggcatgatgtgctccgaaaaggagctcaacatgtccgacagccacgacggcatcatcgacctgcccgaggatgcgcctgttggaacctcgtttgccgcctacgcccatctcgacgaccccatgatcgagatcaacctgacgccgaaccgtccggattgcacctcgatttacggcatcgcccgcgatctggccgcttccggcctcggtaagctgaagacgcgcgccgcgccgtcgtttgccgtcgaaggcgacacgccggtgaagctgacgctcgatctcgatgacgacaggctctgccccggcttcggcctgcgtctggtgcgcggcgtcaagaacggcccgagccccaagtgggtgcagcagcgcctgacggcgatcggtctgcgtccgatcaacgcgctcgtcgacatcaccaactacatgaccttcgaccagggtcgcccgatgcacgtcttcgacgccgccaaggtgaagggcaacctcaccgttcgccgcgccaaggacggcgagacggtgctggcgctcgaccagcgcgaatacaagctcggcccgaacaacgtcgtcatcgccgacgaggatggcatcgagtcgatcggcggcatcatgggcggcgagcattccggctgcgatgaaaacaccaccgacgtgctgatcgaatcggcgctctgggacccgatgaacatcgccaaatcaggccgtggcctcggcatcatcaccgatgcccgctaccgcttcgagcgcggcgtcgatcccgaatatatggtccccggtctcgagcgcaccaccgaactggtgctcgaattctgcggcggcacggcagccaaggccgagatcgtcggctacaagagctatgagcccaaggtcgtcgacttccccttttcggaagtgaagcgcctgacgggcctcgaagtctccaccgatgaaagcatcgagatcctgacccgcctcggcttcaaggtcaccggttccggagagcgcgtctcggtcgcggttccctcctggcgtcccgatgtcgatggcaaggccgatctcgtcgaagaggtcatgcgcatccatggcgtcgacaacatcaagccggcgccgctggaaagccacagcgcgatcaacggccgcatcctgacgacgctgcagatccgcacccgcaccgccaagcgtgcgcttgcctcgcgcggcatgctggaggccgtcacctggtccttcatctccgaggatcaggccaagctcttcggcggcggcgcgccgtcgctgaagctcgccaacccgatcgcatcggaaatgtccgacatgcgcccctcgctgctgccgggtctgctgaccgctgcccagcgcaatgccgacaagggctatggtgacgtcgcgatcttcgaagtctccggcacctatgagaacgacaggccggaaggccagcgccgcgttgccggcggcatccgtcgtggcaccgcctcgatggccggctccggccgcatgtggtccaacacggccaagggcggcggcaagccggtcgacgtcttcgacgccaaggccgatgcgctcgccgttatcgaggcctgcggcctgccgatgaccaacatccaggtcgagcagggcggtccggactggtaccaccccggccgctccggcaccatcaagatgggcccgaaggtcgtgctcggctatttcggcgagttccatccctcgacgctggaggcgctcgacgtctccggcgcgctcgcgggcttcgaggtctatctcgacgtcatgcccgagccgaagaagaaggcgacccgcaccaagccggcgctggaactctcgcagttccaggccgtcaagcgcgacttcgccttcgtcgtcgacaaggcggtcgaggccggcgccatcatcaaggccgcgaccggcgccgaccgcaagctggtcgccggcgtgaatgtcttcgatatcttcgagggcgcctcggtcggcgagggcaagaagtccgtcgccatcgaggtgcagatccagccggtcgagcgcacgctgaccgacgaggatttcgaggccctcacgcagaagatcgtcgccagcgtcaccaaggtcaccggtggcgtgctgcggggttgatgaaatagggtgtgcggcctcggcctctggtgcgggcaggcaacggccctacggccgccgctcgtattggtttagcgctggtcgcgcccccaactctccctcatcctcgccctcgtggcggggatccagccgccgcgcgttggcgcggcggagagactctttcctgacatgcaaggaacgttcattcacggcgcggacgcgccgtggctggattcctgtcacatcgcacgggcgaagcctgggcaaaggaatgagggaggagagtgggctatcgcgtaacgcgatagaaacctacagggcaggctcgcacccatcaatcgtgcaaataataaaccttgttcacgatcgtccatcgcccctcgatcttcagcatcgagagatagtcggtgaagcgcatgccggcgaagtcgtcgctgaccttgacgctggcggcgtcgccgacgacgtcaagcgtctggatgtccatgtgcggctgcgtgcctggcggggccgagccctcggccacgatggcggcgatgaactcgtcgcgggtcgaccattcgaccgcgctctcgtaatgcccgatgacagcgcatttcggatgaaacgccttgcgcagcgccgcctcgttggcgaaggtcatgccttcgacatagagatgcacgactgcctctatcgcctgccggtccgtcatggtccgtacctcgatcgtgtcgatggtgaagtatagcgcggagcgcgcaacgcgcaaagtcgttgctgggtggtgctgacgttaatgcgtggatgggtagagcgtggccagggcggtgccgatcagttcctcggcataggcctgcgcggtcgatgaggcgttgtcggacaggcccatctcatcgcatttgttgccgacggcctcgcggatcaggtgcaggataccgcgccccatcttcccgccatcctcgccggatgtgtccagaaccagcgccagcgaggtcatcgccaccacttccagcacgagcatgcgtcctcttatgtcggacaggcctggatcggccggtcctttgtctttggcatcaggcatggggttcccttcctctcaacggaaagtttacctagtgctaatatgcgcgaggagaagacccaaagttgaacaaatcgatatggccgccatgatctgtggttggatctcgcgcgcgaagcatgaaatcgggttgcgcgatgaaggtccgcgcgaaaggatgagggtctcgaacgcggggaggccgtacatgaagaagccgggatcgatgaaggcactggaggatatgggccgggcgcggttgtcgaggaatttcttcctgcgcgatttcctgcattccgagatcgccgatttccaccgcatcccgaatatcccggatgatccggatctcgcgatcgaaacaggcaggaggctctgcgaggagctgctggaacccctgcaggagaccttcgggcgcttgcacatccgttcgggctaccgctcggcggcggtcaaccgcttcggcaatctgaacaagctcaactgctccaccaacgcatccacggctgcccaccacatctgggacatgcgcgacgcggatggctacatgggtgccgcggcctgcgtcgtcgttccctgggtggtcgatcgctatcatgcgctcgaggactggcagcggctcgcctggtggatccatgaccatctgccctacgcctcgctctgcttcttcccgaaattatgggccttcaacatccagtggcacgaacgcccgcgccgggtgatccagagctacgtcagcccgcgcggcatcctcaccaggccggggatggagaattgggagggcgagcattccgagtggtacgagggttttccgccgttgcggggtgtttgagggtggatggtccgggatccctcgagggagaaagatccaaccacgtctccgggcatgcgacatgaatggccgacttgcgtggtggtaagcatcgagaattgtctgttcggcaccgcccgacatcaaaccccaccaaacaaaaatgccgccaggcgcatcgcgccggcggcattcttatcagcgcgaggcaatcagccccgaaccctcattcccactcgatcgtgcccggcggcttgctggtcacgtcgtagaccacgcggttgattccgcgcacttcgttgatgatgcgggtcgcggcgcggccgaggaattccatgtcgtagtggtagaaatccgccgtcatgccgtcgacggaggtcacggcgcgcagcgcgcagacgaattcgtaggtgcggccgtcgcccatgacgccgacggtctggaccgggagcagcacggcgaaggcctgccagatcgcgtcgtagagaccggccttgcggatttcgtcgagatagatggcgtcggcttcgcggagaatctccagcttttcgcgggtgatgccacccgggcagcggatcgccaggcccgggcccgggaaggggtgacggccgatgaagctgtcgggcaggccgagctccttgccgagcacgcgcacttcatccttgaagagctcgcgcagcggctcgacgagctgcatgttcatgcgctcgggcaggccgccgacattgtggtgcgacttgatcgtcaccgacgggccgccggtgaaggaaacgctttcgatcacgtcggggtagagcgtgccctggccgaggaaatcggcgccgccgagcttcttggcctcttcctcgaaggtctcgatgaacaggcggccgatgatcttgcgtttggtctccgggtcggaaacgccttcgagctcgccgatgaacttgtcggcggcatcgacgtggatcaggtgcaggttgtagtgttcgcggaacatggcgacgacattggccgcctcgtccttgcgcatcaggccgtggtcgacgagcacgcaggtcagcttgtcgccgatcgcctcgtggatcaggagggcggcgaccgagctgtcgacaccgccggagagcgcgcagagcacgcgcttgtcgccgacctgcttgcggatctcgtcgaccgccttctggcggtaggcagacatcgaccagtcgcccttgatgccggcgatgttgtgaatgaagttgccgatcagcttggcgccgtcgggcgtgtggaccacctcggggtggaactgcacgccataatacttgcgcttctcgtcggcgatgaaggcgtagggtgcgttcggcgaggtggcgaccaccttgaagccttcgggcagcgcggtgacgcggtcgccatggctcatccagacctggtggcgcgaacccttggaccagaggccttcgaacaaggcgctgtcttcatcgacttcaaggaaggcgcggccgaattcgcggtgatggccgctctcgaccttgccgccgagctgcatgcacatcgtctgctggccgtagcagatgccgaaaaccggaaggccgctgtcgaagatgatctggggcgcgcggggcgaaccctcgtcgaccgtcgaggccgggctgccggacaggatcacggctttcggcttcaggctcttgaagccttcttcggcggactggaagggaacgatctcgcagtagacgcccgcttcgcgcacgcggcgcgcgatcagctgggttacctggctgccgaaatcgacgatgagaacgctgtcgggatgtgctgtctgggtcatggcgagcctttaatgaaaagcacccggtcttgcaatgcgggaaatccgccgccgcgggattttattgcatcgattgtcccgctctcgcagggcctggaggcgtttttcgggcataagaagccctagaaccagaataccccatcctccagcgccgtgaacaggctgtcggtggcgtcggaaagcttgcggtcgatcacatgcagatattcggtccagccggaaatgtgctgcagctcctcggcgccgtcggaaatcccgcgcaggccggtcagcggcagattgtaggcctggcaggcgcgcaggatggcgaaggtctccatgtcgaccatgtcggcatcgatgccggcataggccgcgcccgagacgatattggcgccggtcgacagcgtcgcttccgcgacaccggggatgcgcagcggcaggtcgatgacggcaggaaggtcgagaaacggcgtgcgccctttctcgaagccgagcggcgaggcgtccatgtcgcgataggagaccgacgtcacctgatagacgcccgtctgctcgagcctggcggagccggccgatccgagcgagacgacgagctgcggcagctcgccctgatgctcgagagcggcgagcgtgcgcgtcagcaccacggcggcctcgaccgggccgacgcccgtcatcaaaggctcgaagcgcgagcgcaggaaggggccgtattcggcttccgcggccatcacgaacaggatggatttccccgcgaccgatttcagctcgaacgtcatccggaaattccctctcggccgcgtatgatcatcatggtgctggtcatcgaggcgatcagcttggcggggccatcgctgatcgcgtagccgcgcccgtctgcgacgatgatgttggagcccggcttggtgatctcgccgcgaaacaggaaacggtcgccgcgccccggcgacatcagattgaccttgaactcgatggtcagcaccgaggcgtcggggtcgatgacgctgtaggcggcgaagccgcaggccgaatccagcacggctgaaatgatcccggcatgcaggatgccgtgctgctgcgtcagcttcacgtcgaacggcagctcgatctccaccatcgcccgctcgacgcgcgtcagttccgcgccgatcgtgtgcagcgccgcctggcgcgaaaaattggtctggatgcggtcgcggaaatcgccgctgtcggtgttggtcatctgtctgccctcgtgcgagccggaaagtgccatgctgcgccgcgtcagacaagcgcaatggatcggagctggtacgattgtgcactcaacgccggtggccggacgtgttagatcgtgcgggtggggaggatggagaggaggaggggatagcatggtgcaggtgaggcgttacacggcggacgattgcgacgacacgatcgcgatctttgtcgcggcgatccgcgaggtggcgtcgcgcgattatagtcctgccgagatcgaagcctgggcgcaggtcgaggatcgcgccgcctgggccgaacgccgcgccagccggccgaccttcattgtagagcgcgggggacacccggtcggcttttccgatctggagcccgacggccatctcgacatgatgttcgtccatcccgcccatcatggcatcggcgttgccagcctgctgctcgcgaaggtcgaggaggaggcgaggaagaagggcatcgaccgcatcttcaccgaggcaagcctgaccgcgcggcccttcttcgagcgtcgcggcttcaccgtcatcgcccgccagagcgtcgagaaacgcggccagcacctcaccaatttccgcatggaaaagtatctcgcggagaccgccttcagttgagatagacgatcgaggcgttgagcagcgtcgcgaaggagacccaggcgaggtagggcaggaagagcagcgccgcgatccggtcggcgttccagcggttgcggatgaaggcgatgatcagcgccaggagggcgaggatgacgaccagcgccaccggcggcatccgcaggccgaagaagaatggcgaccagagaaaattcgccaccatctgccccgcccagatcagcatgcccacggagaggttgccgcgcatccaggtccgcgcgccggcgaggccgatcagcacgtagagcagcgtccaggccggcccgaacacccagttcggcgggttgaagggcggcttggcgagcgattggtaccattcgcccggagggttgccgatgccgatgacgagaccgccgccgagcgcgagcgcaatgaagatgatggtggtaagggctttgttcatgccgctgagatagggcgtggcgaccgccttcgccagagccatattgcatgcgattcaaccgatcgtgcgatgatcgcgattgcccggaggacgcctccgtcggcgccgggcggaaagcatggtcaaacgcgtcgtgacggcgcgatcctgacgatgtgctggtcccaggcgacgttgctgcgctggccgaggaagtcgccgccgtaggaggagacggcgaagccgccggctgccggcgcgatgccggccgcgtcgggcacgagcgcctcgcgcagcacctggccggttatggcgtcgatcgtcaccgaagccccgcccttcggcgatgtcacgcccaccagcccgtccttgcggttgacggcgatggcgccgacatagttggcgagccggcgggtggtctcttcgggcaggtcgacgaagcgcagatcctcgcccttggcgaaggagccgaccagcggcggcaggtcgttgcggcggccctcgtactggcacgcgaaccagatgcggccgctgtcgtcgatatcgacatggcgcgtcgagacctgcgcccactcggcgggcagcgtgtgcttttcgatcagtgccccggtggcggcgtcgaccagcgtcagcgatggctgcatgttgtcgaggttgagcttggtgcggccgaaatccggatgcgtctcgatcccgccattggcgacgacgagcatccgaccgtcgtcgctgacggtcatgtcatgcgggccgacgccataggtctcgaactcgccgatccgctcgaaacggcttctggcgtcgtaaagcccgatcatgccgcgattgccgtcgaaatcgttctcgctggcatagaggatgcgcccgtcgggcgaaaacgcgccgtgtccgtagaaatgccgtccctcggcggcggcgatcacgatcggctcggctttcgcctgcgggtcgaagatcatcgcataggtgcccggccgccgcgcgaaggcgacggtccggccagtggccgtgctgaaggccatgccgtgcgagcgcgccggcagcgccacctgatcgatgatctcgccgcgctcggaaacggtcgcgaccgcgaaggatccgttcgcctgccgcattcccgaggcatagacggcgtcggcgcgctcgagcgccatcagcgcgcgtgactgcaatgccgaaaggaaggtcagcccggcggccttgacgaagctgcgccggtcgatcgccgcactcctgatcatcgttcagtcgccgtcggagaaggagaagccggccgaaaggccgatcgccgcgccgtagtcgtcgctgattgttgtcaccagctcgcgcgtgtcgatcagcagctgatcgagcttggcgcgctccgcgtcgctggtcgcggcctcgatatcggggttgagcttcggcacggtttcgataattgccttcagcttggcgtcgatcgcgtcggcgacggatttcttgtccgatggcagaagatcggccatctgggctttctgccacagcgtgcgcagcgcttccagattcgacgtcatcgacttccaggtgttcttcgagcgccagtagatcgccatcttcgggcgcggcatcgcgtccttgcctttgtagaattgctccagccgctggtcgcggacgttctcggcgccgtgcacgagaatgccgagaagcgcggtcaccgcttccttgttgtccatgaagtcggcgctctgcggacccgggtgcttccagctcgcctggatgccgtcgggcttctcccaggcggcgaccacctcggccgcctcgcgctggatgttgccggcgacggcggcaccgtagaggcagcggaagccgcctttctggctggtcagatcctccgaacccgtgccgtagagcacgtattcaagcgccgtcaggccctgcagcgccacgctcttggcggcgatcgcgtccaccgtcgtatccttggggtcggccttggcgatcagcgtctgcacctgcctcaggcccacgcccttgcgatccgggtagaacaggatgtgctcgaaaagattgtcctgaatgaccgggccgatctgcaccatctcgatgccggaccagtagcggatgatgtcgtcgaaggccgacttcgccttgtcgaggctggcgggcgtgcccttgtcgcagaggtccttcatggccgtcgtcagccgcgccgccgattgctgggcgttgcggtatcccgggcggatcacctcgtcgaccgcgcgctgcatgacgggaagcacggcatcctcgttcaatcccgccggagcgccagcctggccggccggagcggcggtctggccggtctgggccggagcctggcccgtctgcggtgtggcggtctgggccgcggcgctggaggcaagggcgctggaggcaagggcgaaggagagaaccagagggtaccaaaggcgcatcaaagagactccaaaaacgtaatcagtgcctgtctgctgtcggcaggcagggaggcaaatgcgtcgcgcgacttctgtgcttcgccgccgtgccagagaatcgcctcggtgaggtttctggcccggccgtcatgaaggaaaaagctatgtccgctgacagtccttgtgagacctataccccatatcggcggcgtgcgccattcacgtccgcttgcaaaaccaacctgttgcccatcggcaagcccttcgcccatgtcgtgcagcaggaagtcggaatagggccagatcagctggaaggactgtgccttgtcggcgctgtcgcggcgggtgacgaacttcggaacatggcaggccgcgcagccgctgtcgtagaagaccttcttgccgttgagcgtctcgggaaaactcgccttgcgccgcgccggcacggcgagattggcggaatagaaggtcaccaggtcgaggatcggccccggcgcttcctcgtttccgagccgcttctgcacgccgtcgggcatgtcccggcaggtgccctgcgcctcggtacagtcgccatacgccgccggccggtcgggcgtggagatgccgatatcgctggcaaaggcatcggcgctctggtcgcgcacgctcgcgttctgcgccttccagccgaagcggccgagcgccggcttgccggtgcggtggtcgcgcacgatcgccgccttgccggagatgccgtcgccgttgctgtcgtcgggatcggcattggcgaggatatcggcctcgggaatggcctcgatcagcccgagcccgatcatcgccggcgccacgcgcggcgagatcgtcgtggccgggtcgagcggcccgtagccgggattgtcgacggagtagcgcggccgccgcagcgatacgatctcgccgccggcaagcgtcaccgtctcctcggtgtactcgatcttcatcttcccctcggagggaaggcccgctaccgcgcgatcctgcagctggcggccgtagaccggatcggggaagttgaggatctcggcattggcgatggcgcgttcctcctcggccgtcctggccggccgcgccagccgcaggaacatcgaggcggtgttggcgccggcctccggcggccggcctcgcccgtcattgacgtggcagttcatgcaggagcgggcgttgaacaacggccccagcccgtcggaggcgagcgtcgacgacggagcggaaacccagagtttcttgaagagcgcgttgccgagcttgaacggctgctccttctcaaagggaatgttggccgagatgcgcgagaaggcatcctgcgtcaccggatcgatcgacgtggcgccgcccgcctgcatcgcctcgtagggttcggccgtggagaagtcggtggtcggccgcgtcacctcggcgacgcgtttggcgtccgcttccctgagatcggtgcgtttcgtcggaaaatcgaagccggccgcaagcgcgacggagaggcccgcgatcgtggcgcacgcgagggcgctgaagagaagacggcgggccgggaaaggcgacatcaggggttcgggccgcctcgatggcgaggcggcccgccttttcacttatttgaagacggcagtaggattatccaagctgtcggaaccttcaagcttgaccgtgccgagatcgagcgcggcgataacgcgctggatcgacttcgtctggtcgatgaggccgtcgatggcggcctgaacgacggcgttgcccttcttgttgccttcggcgatcatctggtcgtatttctcgacgttctggccgcgcttggccatgatcgccatcgccttcatcgtcgtgtcgagcttgccctgcatttccgcgtcgagcttcttgtccttggcggagacgagatcgtgcagcgacggacccttcatcttcgtgccgtcggcgcgggtatagttgcccgtataggcggtgacgatcccgacggcgtcgttgagatgcgagttgtaggtgttgtcggagaagcaatcctgctcttcttcgggatcgttcaggatcaggccgagcttcatgcgctcgccggcgagttcaccataggagagcgagcccataccggtcaggatggcgacgaggccggccttcggatcggcttcgacctgcttggtggcctcgccatcgggcgtccacttgtcgaccatttcctgcaggtcggagaccagaagcgtcgaggtcgacttcagatactcggcgcggcggtcgcaattgccgttcgtgcacttcttgaggtcgtagtcggtggccgggcggttgccggcgccagggccggtcccgttcaggtcctggccccagagcaggaattcgatggcgtgatagccggtcgccacgttggcgtcgaccgcgccggcgctggccagcgtgccggagagaaactcgggcgtcagcttcgacgcgtcgacatccttgccgtctatcttgatcgtcttgttggcgatcacgttggcgacgtaaagcgcgttctcgtcgctctcggtgccgtaggacgtgtcgacatagtcgatcaggccctcgtcgagcggccaggcgttgaccttgccttcccagtcatcgacgatcgggttgccgaagcggtagacttcggtctgcaggtagggaatgcgagccttgatccaggcggcgcgggcggcctgcagcgtcttgtccgtcggatccttcaagagcgcgtcgatcgcgacgtccagcgccttggcggtgatcagcgaatcctcgtacttcgcgtgggcgacttcggtgtagtatttcacaacggcggcagcgtccggtgccgcgtaagcgggaatggcggacaaagcggttggggccaccgccagcgccagggctgcgcagaaattcctgttgagtttcatgggatcctctcctgtgacgggcctcccgtatgacgcccggcgaaaatgtcttcgcgcaaaagaaaaccggtgtcaaacactctagtttggaatggttttaaggaaacgaaatccgccgaaaggccgtcaaatcgaaatcgaattgcttggaaaatgggcgatatgtgagtaatcactgtgcatctgcataaacattatccggatcgaccgcgcatgcgccgacacatcaagcatttcacccatcgccatgagccgaagggtaccgttcacctccacctgaaatccggcatcggcgccatgatcggcatggcctcggtcggcgcgttgaccgtgttcaccggcattccgctgttgatcgcgcccttcggcgccacggccgtgctgatcttcggccagccgaagagcccgctcgcgcagccggccaacgtcatcggcggctacctcctggcggcgctgatcggcggcctggcggtcttcctgttcccggggctgtggtgggtcggcgcgatcgccgtcgggctgaccattgccggcatgctgatgttgcgcgtcacccatccgccggccggcgccgtgccgctggtggctttcggctcgcatatgggcgggcccatgctgtttgtgatcgtcggtttcggcagcgcgctgttgatcgcgatcgccgtgctgcatcacctgatcccgccgcggcatcaatatccgctgcgggctccgcactgatcaggccatgctggtccgggccatccggcccggtcgttcgatcagcccttgcgcttcatccggcagaagaagaatccatccgtatcggtcgatgcgggcgtcagcgtgatcgtctggccgtccgaggagcgcgggcgcgggctcgccttgccgaagagctgatcccagccctcgagcgcgcccgaaatctcgaactcgggatttgcggcggtaaacgcgcgcacctgatcctcgttttcctgcggcagcaccgagcaggtcacgtagatcagctcgccgccggggcgcacataggcgcttgcctgcttcagcgcgtcctgctgctgcgcggtgcgctcgtcgaggttcttggcggtcaggcgccacttcgtatccgggcgtcggcgccatgtgccggttcccgtgcaaggcgcgtcgaccagcaccttgtcgcagcgatcctcgaggttcttcagcgccttcgcattgtcgtgcacctggacgttgcgggtccccgcccgcttcagccgctcgatgatcggcgccagccgcttgcggtcggcgtcataggcgtggacctggcccttgttgtgcatcgccgccgacatggcgagcgtcttgcctccaccgccggcgcagtaatcaagcacctgttctccatcctgcggcagcaccaggtcggccacgatctgcgatccctcgtcctgaacctcgaaccagcctttttggaacgaaagctccgctgtcacgttgggaagacgggaggctccttcgccggcggcgatccggatgccgtaacgcgcgatgtttgcctcctgcgcgcctgatctttcgagcgccttgacggccttttcgcgggtggccttcaggatgttcgcacggagatcgagcgtcggtcgctcggcaagcgcctgtgcctccctgagccaggtgtcgccgaaggatttttcgaaggtgggctgaacccactccgggatatcgccctgaatatgggaaggagcgtccttgagatcacgggagtgaaaggccgaaagtgttgcctcggagagtgctgccggcgcgaacttgtcgtcggtgagttcggcggcaagcgtttcgggcgtgaagccccactggcggaacatgacggcatgggcgatcgccgatgcgctgtcgtcgtccatcagccaggcgtgcgagaggcgcatgcgaagcgcgtcgtagacgatgttgccgatcgcggcgcggtcgccggaaccggcgaaccgatgcgcgagcccccagtccttgagggcatcggcgacaggccgtctgcgggcatcgatgtcttcaagaaccgaaatcgccccttcgagcctaccgcccaatcgcattcacaacgctcctattgcctggatcaatgccggacccttaaaggccggcggcttgtgaacgatccgcaggaagcgcgacagacgcagcggatggtacacaagtctcaaccgcgtggtatccgcgattggcggcaagagcaagcggtgccttatgttcaggctcagccgatcacttcgtagcagaccttggccgtgccgctgctgaccatgccgatattctgcgcggcggcacgcgaaagatcgagaacgcggccgcggatgaaggggccgcgatcgttgacgcggacgacgacgctgcggccgttgttgcggttggtgaccttcagcttcgtgccgaaggcgagcgagcggtgcgcggcagtattgatggtcgggttcatgcgttcgcccgaagcggttttggagtgaagtgcgtaccacgacgcgccaccgcaaccatttgcagcaaaaccttccatcggaaggatcgtagaagaggctgctatagttgtgacggcgataatagaacggcagattttcttcaaaacagggtgtccctcaactgttaaacctacgccttgtgggcggcgggggcttaaaccggtcgaaaagtggcagaaaagtgccccgattgatcacggaatgttacattctgaaatatatgtgatgagccggcgaaatgattcgaaccgtcgtcaagcggtttcgaatgaaaaaagcacaattgaatcaagtaaaattagaactttttttgcaagcaaccgttcgcgactctcgcgatcacaaaaatcacgaaaataattttgcgcgagcgtcataattctcgccgcatttgggcaatttccaaggcttgtgcccaaattttgcgccaaattttaacgaaatatgccgggagtaggaaattcctaccaattcatcgcatgcgatatgacagcttaaaggacctgcggcctcagccgcgccagcgctcgtcctgcaacaactgcgcgagtgattgcggataggtggggaaggcgaagctgaagccggaggccttcagcttggcgttcgaaacgcgcttgttctcgccatagaaggagcgcgccatcggcgtcagttcagcggtttcgaaggcctgttccggcggtggctcgacgcccatgaggcgggccgcctcgacgatgacatcctgcggcgggccggggcggtcgtcggtaacattatagatgccgccaagtttgcggtccgagaggaaccgcgcgctggcgccgatatcctcgacgcggatgcggttgaacacctgatccttcttgatcagccgccgcgccgtgccgcgcgccagattgacgaaagcgttgcgacccgggccgtaaatgccggacagccgcagcacggccgcgggaatgccgatcttgtcgccgatgccgacccacgccgcctcggcctccagccgctccctggagcgacccgaaaccggcacgcagggcgtttcctcgctcacccagttgcccttgtggtcgccatagacgccgacggtcgagagatagccgatccaggaaagcgccggcatcagcgcatcgatgcgctcgcccgcaagcttcagcagcggatcgcccgcctcgcgcggcgcgatcgactgtaccagatgcgtggccgagcgcatggcatcaacaagtgtctcgtcgagcgtttcgccgtcgaacacgaaggcctcgatgccctgggcgcgcaaagccgccgccttatcttgagagcgtgtggtgccggacacgcggaaaccgtcggccatgaacgccctggcgattgccgtgccggaatagccgcaaccgaaaatcacaagatgcatcacgccgctcccgccagtctccactcgttcagcacatcgctgtccgactcatcctgcggcctttgtgccgcaaagcgcttgaattcgccagcctccatcagccgcgacagcgcccatatcgccatggcgcgcaccaccggcgaggcgtcggaagaaagcgagagacaggcatcgaccagtccgcgatcgccggaattgccggccgcgatcagcacgttgcgcacgaagcggtcgcggccgatacgcttgaccggcgagccgctgaagaagccgcggaacgtgggatcgtcgagcgcaagcagcgcggcgatctcaggctcccgcaggtcctcgcgcgccttcagcttcatttccgaggcggcgctggcgaacttgttccacggacaggcagcgagacagtcgtcgcagccatagatgcggttgccgatcagcggccggatctcgggatcgatcggccccttgtgttcaatcgtcagataagagatgcagcgccgcgcgtcgatctggtatggcgccgggaaggctgccgtcgggcaggcgtccagacaggcccggcacgagccgcaatgatcgatctccggcgcatcgatcgagagatcggccgtggtgaacatcgagccgagaaacagccaggagccgtgcgcgcggctgacgagattggtgtgcttgccctgccatccgagcccggccgcggccgccagcggcttttccatcaccggcgcggtatcgacgaacaccttcacgtcctcgccggcgcgcgccgcgaaccgcgtggcgatctctttcagccggcccttgatgatgtcgtgatagtcgcggttgcgcgcatagaccgagatcgccgccttgtccggcttgtcgagaatgccgcgcgggtcttcctcggggccgtaattcatcgcgaagacgacgaccgatttcacgtcgctccagagcgtacggggatcgccgcgccgctcgcgcgtttcggccatccactccatcgtcccgtgcctgccggcatcgatgaactggccaagacggtccttcgcctcgggaatgctgtccggacgggtgatccgacagaggtcgaagccgagcgcccgcgcctgcgtcttgacgaaggcggtcagcgtgtcgcggcgtttgtcttccttggtctgcgcggatcgttcgggcatgagaggccccgtcagaaatccaggtcggcgtagtgcgaaacaggggtcaggccgcgcacgcgctcggtgagcagcggtcggaacgatggacgcgacttgatgcgctggtaccattccttgacgacgggcgattccgaccagtcgatctcgccgagataatcgagaatggagaccgacgaggcggccgcgagatcggcgtagctcatccggtcgccggccagccactggcgcgagccggagagccaggtgagatacttcatgtgctggcggatattggcgcgcgccgtgcgcaggatcttcgaatccggcgcgccgccgccctgatcggccgtcatctgcagcttgtagacgcgctcgcgggcgagcggccgggtcacgtcggtttccatcttgaccatgaaccactcggtcagacgcctgatttcggcgcgctggaacgggtcctcggccaggagccgccggtcgcgcttcaacacgccgtgcgtctcgtcgagatactcggagatcacggtggacccgcagagcgcgcgcatgctgtcgtcgacatagacgggcagcgtgccggccgggttgagcgccaggaagtcccggcgcttctcccaggtctgctcttcgatcaggtctgcctgatagccatactccgtcaggatcaaccggacgaagcgtgatgaggatgacatggggtggtgatagagcgtgggcatcgagactcggattttttgatggctggggtgcacgtcgcagggacgcgatgattatagcgccctagtcatgactcattcgttgaagctatagaagtttggcccctccaacacaagcgagtcgggcctccgaaaccctgacgaaggaaatcgacctcgcccaaaaatcgccgacaaccgatcagaggttctcgtcgcatcctcgtctggtgaaaatcagtgtcgttcctcccggcgacacagtgcaattcacgtccgaccgaacccaaagcggagacaattgatggattacattaacgcgataatcctaggcatagtcgaaggcattaccgagtttctaccgatttcaagcaccggccacctcatcattgcggagcaatggctcggccagcgatctgatcttttcaacatcgtcattcaggccggcgccatcctcgccgtcacgatcatctactggcgccgtatcatgacgctcctgctcggctggcgggacgcggacaatcgcgcctatctcggcaagctcgtccttgccttcctgatcaccgccatcctcggcctgatcgtcaagaagctcggcttcgagctgccaagcacggcaacgccgatcgcctgggcgctgatcatcggcggcatctggatgatggttgccgaatggctcgccgcccgccgcccgccgcacaaggagatcacctggctggtcgccatcctggttggtatcgcgcaggtcgtcgccggtgtgtttccgggcacctcgcgctccgcctcgacgatcttcgtcgccatgctggccggcaccggcaaccgcgccgcggccacggaattcgccttcctcgtcggcattcccacgatgtacgccgcaagcgcctatgagctggtgaagacgttcagggatggtggcgcggccaatgaggactggaccgctctcggcattgccttcgtcgtgtcgacgatcgttgccttcgtcgccgtcaaatggctgctctcctatatccagagcaacaagttcacggccttcgcgatctaccgcatcattctcggcgccattcttctgggcatggcatcgatgggtatgatcgcctgatcggagagagccaacgctctcgatcaaaaaaagaaaccggcgcgatagcgccggttttctgttaccggagagcgccggtttcgcaaggatcgacgccataggccggcgagcattcgcccttcacggcagcgaccgaaccgggcgccacgaaagaaccagccagaatcaccagcgccgcggaagcaaaaagcagcgcgattgacctacccatcgaaattacctttcaagccgtttgaacgcgccgccacgaggcgctgattccaagcacagacgcgcggggtgtgtagtcagaggaatggcaaatagcaataaaggttcccgctaaatttcctgttaattccgctaaatttttcatgcgacttttatgtaacgtcctgcggtgcataaccgcgtgaaagcgcgctgttcagcctgttttttcatccctgcctccaaacgcgcaacgccgcccgcgaagcccgcgagcggcgttgtcgtcaagcgatcggcggtggctcaggcggccttgccgctgttcgtatactggccctgcgggcggaactgcacgaggtagctgtcgatgacggagctcaccatcgtcggcgcgatgccgatgcccttcagcgtccgtccctcggcttccgcctccttggacacgacattgtccttcttcaggagcttcacctggtcgggtgtgatcggcggcgtgatcagcgggatcatcgaggcgacgctgccgatcagcgaggcgacgccgaaggggagcgagatcagcgggttcgagcgcgcggtcgacttcagcaccgcttccagacactggcggaacgtcagcacctcggggccgccgagctcatagatcttgccgccggcgaccttgccttcgacagccttggccaccgcctcggcgacatccatgacgtagaccggctgcaggcgcgtcttgccgccgccgaccagcggcagaaacggcgcggagcgcgccatgccggcgaacttgttgaagaagccgtcttccggaccgaacacgatcgacggacggtagatgatggcgtcgggcgcgaccgaatggatcgcggcctcggcgcggcccttggtgcggccataattggaatcggaggtggcgttggcgccgatcgccgagatgtggaccagcttggcaccggcgccgcgcgcggcttccgccacggcgcgaccgccgaattcctggaccgcctcgaacgagttgcggccgttttcgaacaggatgccgacgcagttgacgacgtaggatgcgccctcgacggcgcggtcgatcgactggcggtagcgcaggtttgcctgcacgaaggagatctggccgacattgccgagcggctgcaggaagcccgcgagatcggggcggcgcacggcgacccggatgcggtagccgcgcttggcgagcgcgcgcaccacatgcctgccgacgaagccggagcctccgaacacggtgacgagtggcggcaggttggcaagggtcatggcaggttcctcggaaggctgatgtgaatggcaggtgatgtcgtcttagcccaatcgcggtgcgacgaaaaggcctatcgcaccgcgcctgtcacgactttgatctcgctcaaacgccttcgacgacaaccatttccgcgtcggccacttcctggcggatcttggcggcgatctggtattccggcgagttgtagcaatccaccgcatgctgcatcgaggggaattcgatgacgacgttgcgtgcccgcgccttgccctcgagctcggtcagcgccccgccgcgggcgaggaaactggcgccgtacttctcgaaggccggcttggcggcggcgacgtaatccttgtagcgctcggcgtcgcgcacgtcgacgcgggcgatccagtatcccttggccatggtttctcctcctcgagagcggttgcgtgaaacgaaaaaacggtcagcggttggcgggccagagcgcgctgaccatctcgtcgagaatggccttggccgcgaccttcggctccggcgccttgacgatcggacggccgacgacgagatgcgtcgagccggcgcgcagcgcgtcgtagggtgtcatcacccgcttctggtcgccgcgttcgctgccgctcgggcgaatgccgggtgtgacgatcgccatgtcgggaccgacgacatcgcgcaccagggccgattcctcggccgagcagacgatgccgcccatgccggcttcgcgcgcctgttcggcgcggcgcagcaccagcgatcgcggatcgccgccatagcccgcttcggtaaggtcggcttcgtccatcgaggtcagcacggtgacgccgagcaggcagaggtccgagcccctggcggcctcgacggcggcgcgcatcgccttcggataggcatgcagggtcagcatcgacatgcccatcttggcgatgttttcgacgcccgaggcgaccgtgttgtcgatgtcgagcagcttcatgtcgaggaagaccttcttgccgtctttggcaagatcgcgggcgaattccaggccgccggcgaacaccagctggtagccgatcttgtagaaggagacggtatcaccgagcgtcgcgaccatcgtctcggcctcgtgaagtgtcggaacatccagtccgacgatcaagcgttcgcgcgcgtccatctcacatccatccctgccagtcttcgataggcgtccagtcgcatgataggcgccgatccgcaagacggaaacaatagagattgccgccgccatgaggctggtcgcgatcccgcccgatcggccgcccttccaggtggcatttcagcagcgtgcccacgccgccatggccgacgaatgcgataggccgcccggtatcatgtgtggagagaacgtgctcgacgctggagacgatccgccgctgcgcatcgatcgcccgctcccatccattgaagctctcgtcagggttggcgaaaaaccggtccgccgccctctcgaattcaggcggcggcaggaagccggtcgcggaccggtcgttctcgtgcatctcctcgacgatctcgaccgtcacgccgcttggcgcggccagaatgccggcggtctcgatcgccttggtttcgccgctgctgacgatccgccgcaattgcgccgcccagggcttggccgcggccatccgcgcccgcgcggctccgacatccgacaatccccattcgggcaccgggacggcggcgtcgatcttgacttgcgggtgggtgatgtagaggccgaacatctcagcttcggcggtagatccacagctgcgccggcggaatattgcggacgatgaagtcgaagtgctggatgtggtagcgatccggtcgcgcgatgatcggcgaaaccgcgccataggaaatctgcaggaaggggcggccgtgcggcagccggtccaggatgctttccagcatggcggtgcgcgcctgcatcgggaagttcaggagcggcacggcggaaacggcgctgtcgaacttctgcccttccatgtgggcgagcgtcttgtcgagattgaaggcgtcgccattgatgacgttgacgcccggatacatgcgcaccagatgttcgtagaaatcggtcgaatattcgatcgcgacgagattttccggctttacgccgcgctgcaggatggccttggtgatggccccggtgcccggcccgagttcgagaaccggcaggccggaattcgggttgacgatgctggccattctgcgcgccgtgatcgacgacgtcggcacgatggagccgacgatccttggcccttgcatcatccctttgaaaaaccggatctcttcgtcgaacttcttgcccagtcgttccttcaggcgcaagccacccatgcccttctccttcgtgcagcacatgctgcgagcctatgtgcagtcattgcgacgccaaaacaaggcctgacgtcgtgatcagcaaagtgtgaacgacaaaagcgacccgttacacacgcatcggcatcagcacgtagagagcatcgtcgccggcggtgtctcggatgagcgtcggagaaccagcatcggcaagcaggaagatcgcctgatcgcccgagagctgcgcggtgatatcgagcaggtacttggcgttgaagccgatctccatggcgtccgtatcgtatccgaccgcgacctcttccgtggcgctgcccgaatccggattgttgaccgtcagcagcagctgcccgtccgaaagcgccagcttcacggcgcggccacgctccgacgagatggtcgagacgcggtcgacggcctgggcgaagctcgtgcagtcgacgcgcatttccttgtcattgccggtcggtatgacgcgctggtaatcggggaaggtgccgtcgatcagcttcgaggtcatgacgatcgagccgatcgaaaggcggatcttggcgtcggagacctcgacggtgaccatcgcctccggattgtcgaccagcttctgcaactcgccgaccgtcttgcgcgggatgatgatcccgggcatgccctcggagcccgagggagcattgacgtcggcgcgcgccaggcggtggccgtcggtggcgacggcgcgcagcttcaggtcgccttcgctttcgatcgtgtggaagaagatgccgttcaggtaatatcgggtctcttccgtcgagatcgcgaactgcgtgcgatcgatcagcatcttcagatccgtcgccttcagcttgaacgtatgcgtgaaggtgccggccgtgagatccgggaagtcggcttccggcaggcactgcagcgaaaacttcgaacggcccgactgaactgtcatcgagccgccatcctggctggtggcgagcagcacttccgagccgtcggagagcttgcgcacgatgtcgtagagaagatgcgcgggaaccgtggtggcgccgggctgctcgacattggcgggtgtcgcttccgtcacttccaggtcgaggtcggtcgccttcatgtcgaggctctggccatcggcgcgcagcaggatgttcgacaggatcgggatcgtgttgcggcgttcaaccacgcggtgaacgtggttcagcgacttcaagagattggaccgctcaatagtaatacgcatgggatgctaccgctttcgaccgttactgcccgggcgcgttacgcgcctgaataatgcctttcccaaaagctgggaccggaggattggacgcgcaaaatggcagaattttgcggacgaatgcaagaggcgcaaaggtcgccgcccccgcaatcggcattttcgctgcggatgctaacagaaatcaccgttaccgtcgaagcgctgccccttgccgaaggcatggccgtcgcccataaaggccggtagccagaaagggcaccgatatcttggacaatgaaaacgcgacgacagagggcggcaggcagcgtagcttccgcctgcacaacatggccgttcccgcccgcccgcaggagcccggcctctatctcgtcgcgacgccgatcggcaatctcggcgacataacgctgcgcgcgctggagacgctggccggcgccgatgtgctggcctgcgaggatacccgcgtcacccgcgtgctgctcgatcgctacggcatccagaaccgcccctacgcctatcacgagcacaatgccgacgaggtcggaccgaggctgctcgcggcgctcgaagccgggaaatccgtggcgcttgtctccgatgccggaacgccgctggtctccgaccccggctaccgcctcgcgcaatcggcgatcgaagccggctatcgggtgatcccgatccccggcgcgtcggcgccgctggcggccctcgtcggctccggtctcccgaacgatgccttcctcttcgccggtttcctcccgaccaaggacaaggcgcgccgcgaccgcctgtctgagttcgccgccacgccggcgacgctgatgttcttcgaatccccgcaccgcatcggcgccgcgctgatcgccgccgccgacgttctcggcggcgatcgcccggcctccgtctgccgcgagctgaccaagagctacgaggagttccgccggggcacgctcgccgaactcgccgcccactatgccgatgtcgacaatgtcaagggcgagatcgtgctcgtcatcggcccggcgccggcccgcgccgtcgaggaagcggatatcgacgccatcctcgccgacctctctcagaccctcccgaccgccaaggccgccgccgaggccgcccgcatcaccggtctcccccgcaaggagctctaccagcgcctgctcgaccgcaaggccggcgatggccgctagtcgcgacaccggtcttcgccgcaaggcgctgcgtcggggccgcgtctccgaatatgtcgctgctctctatctcatggtcaaaggctaccgcatcgtcgcgctgcgctaccgcacgcggctcggcgagatcgacatcatcgcccgcaagggcgacctggcgatcttcgtcgaggtcaaggcgcggcgcgaggagggggcggccatagatgccgtctcgcatctcacgcagacccgcattcgcggcgccagcgacctctggctcgcccgccagcgcgaccgcgcgcggctatcgcaacgctacgacatcgtcgccatcgtgccgggcaaatggccggtccatttgcgcgatgcgttctgattgctttcgttagccggttaatttcttcggaatttgtaatcggcctgtcatgaaatcgttaaggaggtgtcacaataggcctctattgcgtcctcacgccaacaatggtggagagggtttttcatgtttaagactatttcattggccgctgccgcggttgctttgtccgcttccgcgtccttcgctgcaaccgaggtcacctggtggcacgccatgggtggcgaactcggcaagaagctcgaggaagttgcccagaagttcaacgacagccagagcgaatacaagatcgttcccgtttacaagggcacctatcccgagacgctgacggccgcgatcgccgccttccgcgccggccagcagcccgccatcgttcaggtcttcgaagtcggcaccggcacgatgatggccgccaagggcgccgtctacccggtctaccagttgatgaaggacgagggcgagccctgggatccgtcgaagttcctggcgcccgtcgtcggctactattccgatcccgagggtaacatcctgtcgatgccgttcaactcgtcgacgccgatcctctactacaacaaggacgtcttcaagaaggccggcctcgatcccgaagtcgctccgaagacctgggccgagcttgccgagatgagcaagaagatcgtctcctccggcgctgccaagtgcggcttcaccatgtcctacggcgcgacctgggttggcctcgaaaactactccgccatccagaacctgccctacggcacccagcagaacggcttcggcggcatgaacgccgagttcacgttcaacggcccgaaccaggccaagttctgggacaatctgaagacgtggcaggatgaaggcgtctacaagtacggcggcccgagcgccggcgccgacgccgctccgctcttctactcgcagcagtgcgcggcctacatgaactcgtccgcttcgcgcgccggcgtcatcaacaacgccaaggacttcaaggtcggcttcgcaccgctgccttacgacgacgctgtcaccaaggatccgaagaactcgatcatcggtggcgccaccctgtgggtcctgaatggtcagaaggacaaggctgtctacaagggcgccgccaagttcttcacctacctctcgcagcccgaggttcaggccgagtggcaccagttcaccggctacctgccgatcaccaatgctgcttatgagcttggtcagaagcagggctactacgaaaagaacgccggttcggacatcgccatcaagcagatcatgcgcggcacgccttccgaaaactccaagggtgttcgcttcggcaacctgacgcagatccgcgacgttctcgaccagcagctcgaagccgttctcaacggcaagaagaccggtcaggaagcgctcgacgaaggcgtgaagcagggcaacgccaagctgcgcgaattcgaagccgcgaactccaactaagggtcgctccctccgtccgccctctccggcccgtccggggagggcattttccttgaggggtcacgcatgcaaaccaaacgcaccgtcttccaaagccgtctcctgccctatctcctgatcgcgccgcagcttctcatcacgatcgtcttcttcgtgtggccggcggttcaggccgtatggcagtccttcctgcgccaggaccccttcggtctcaaggacaccttcgtgggcatggcgaactacaggcgtttgcttggcgatcccgattacctcaattcgcttgccgtcaccttcaccttctcgatcggcgtcaccgtgctgtcgatggggctgtcgctcctcttcgcggtttgcgtcaaccgggtgatccgttcgcagcgcttctacacgacgcttctggtctggccctatgccgtggcgccggccgcgtccggcctgctctggtggttcatgttcaaccccagcgtcggcatcatcccctatgtgctcggctatttcggctacagctggaaccaccgcctcaatccgaacaacgcgatggtgctgatcatcatcgccgccgcgtggaagcagatctcctacaacttcctgttcttcgtcgccggcctgcaatcggtgccgcactcgctgacggaagcggccgccatcgatggcgccggcccgatcaagcgcttctggacgatcgtcttcccgctcctgtcgccgaccaccttcttcctggcggtgatcaacatcacctatgcgatgttcgacaccttcccgatcatcgacgcggccaccggcggcggtccgtcgcaatcgaccaacatcctggtctacaaggtctacgccgacggtttcgtcggtctcaacctcggtccgtcggccgcgcagtccgtggtgctcatgctgatcgtcgtccttctgaccgtcgtccagttccgctggatcgaacgcaaagtgcagtattgaagcgagagccagccatggtcgagaaccgtcccttcctcaatttcctcactcacctcgtgctgatcctcgggatcgccatggtggtctttcccgtctacctcgccttcattgcctcgacgcgcggtccctcggacttcctgaccggcgtggtgccgctcactccgggcacccagatgatccagaactacggcgtgctgctcggtgccggcgcatcgaatgccggcgcgccgcccttcctgctgatgctcggcaacagcctggtcatggcgatcctggtggcgatcggcaagatcgccatctcgatcatctcggccttcgccatcgtctatttccgctttcccttccgcgtcgtcgccttctggatcattttcatgacgctgatgctgccgatcgaggtgcgcatcctgccgacctacaaggtcgtcgccgatctcggcctgctgaattcctattccggcctcgtcattcccgtcatcgcgtccgccaccgcgaccttcctgttccgccagttcttcctgaccgtgccggaagagatgatggaggcggcgcgcgtcgatggcgccggggcgctgaagttcttctgggatatcctcctgccgctgtcgcgcaccaatatcgcggcgctgttcatcatcatgttcatctatggctggaaccagtatctctggccgatgctgatcaccaccgagccccgctattacaccgtcgtcatgggcatcaagcgcctggccgcggtgctggagggcgacacccaatggaacctcgtgatggcgggcgtcatcctggcggccctgccgccggttctggtcatcattttcatgcagcgccttttcgtcaaaggcctcgttgagacggagaagtaacaatggcctccatcgacgtcgataatgtcggcaagatctaccatggcggcgttcgcgccgtttccgatatccagctgaacatcgccgacggcgagttcatcgtgctcgtcggcccgtctggctgcggcaagtcgaccctgctgcgcatgatcgccggcctggaaaccatttccgagggcgaggtgaagatcggcccgcgcgtcgtcaacaacgtcgagccggctgatcgcgacatcgccatggtcttccagaactacgctctctatccgcatatgagcgtgcgccagaacctcgaatacggcctgaagaaccgcggcacgccgcgggccgagatcgacgcgcgcgtggcggaagccgcccgcatgctggagatcaaccagtatctcgagcgcaagccgaaggcgctctccggcggccagcgccagcgcgtcgccatgggccgcgccatcgtccgcaagccggccgtcttcctcttcgacgagccgctgtccaacctcgatgccaagctgcgcgtttccatgcgcggcgagatcaagcgcctgcagcgccgcctcggcaccacctccatctacgtcacccacgaccagctggaagcgatgacgctcgccgaccgcctggtggtgctgaacggcggcaaggtcgagcaggtcggctcgccgctcgatgtctaccaccgcccggcctccaccttcgtcgcctcgttcatcggctctccggccatgaacctcctgaagggcgagctgcacggcgacaagctggcgctcgggcccagcctgatcgaccttgccggctccgctccgacctcgggcgcggttaccgtcggcatccgcgccgaggatctgtgccttgccggtcccgatcagcacgccatgtccgtcaccgtggattatgtcgaggaactcggtgcgcaaaggctggtccacggcctgctcggcgatcagccgatcaccgccgtgctggcgcccgatatcgccattccgaccgagctgcgcctgaccatcgccccccagaagctgcacttcttcgcggccgacaccggcaagcgcatttcccttgccggcgccgatggcgtatccgcgccgacggcggtcgtccagcccgtctgacgacgtctagggcttaggcgaaagaagcatatcgcggcattcgttacaactttagcgaatgtctgaacggctctgtcaggactctctgctatccccaccccaggggatagtgcactcagggggttccggtggcatctttgcatcttatgttcgcgagcgcgatggccctggccgcccgctccatgcccgatatcgtggcatttccgcgcggcaaatcctttgtcgcgcattcgagcgatctcatcgacatgaaatcgacgccgatcaatccggactggatcgtcgcgggcgatccgcgggcgcgcaccggcgagcactcgcgcggtcacgacgatgcggcgctgacggcgatctgggactgcacggcgggtgagttccgctggttcttcggctgggacgaaacggtgatgatcctcgagggcgaggtccacatcaccgccgacgacggcaccgagcgcatcctgcgcgccggcgacgtcgccttcttcgccggcggcacctgggccagctggcgggtcgacaactacgtccgcaaggtcgccttcctgcgcaagcccttcccgaaaccggtggccttcgcctaccgcctgcgcaagctgttgcgtggcaatgcacagcagggcatcgccgcctgagggacttgtcgtccggcgccacaaaagccgtccgttggccgttgcgttcgcgatctcggcggcctacatctgtccggcaatcgctaagggacggaaatggccaagatcaagaacgtagcggtccagatggaccatgtcgcctccatcaacatcgcgggcgactccacctttgccatgagcctcgaggcgcagacccgcggctacaagcttttccactacacgcccgaccgcctgagcttcctcgacggcaagctctatgcctcggtcgagccgatgacgctgcgcgacatcaagggcgaccatttcgagctcggcgcgcccgagcgcgtcgatctgtcgaccatggacgtgatcctgctccgccaggacccgcctttcgacatgtcctacatcacctcgacccacctgctcgagcgcatccatccaaagacgctcgtcgtcaacgacccggcctgggtgcgcaattcgccggagaagatcttcgtcaccgagttcgccgacctgatgccgaggacgctgatcaccaaggacgccgccgagatccgccggttccgcgacgagatgggcgacatcatcctgaagccgctctacggcaatggcggcgccggcgtcttccattcgaccagggacgaccgcaacctctcctcgctgctcgaaatgttcggccagctcttccgcgagcccttcatcgcccagcaatatcttcccgacgtgcgcaagggcgacaagcgcatcctgctcgtcgacggcgagcctgtcggtgccatcaaccgcgttccggccgagcacgacagccgctccaacatgcatgtcggcggccgcgcggaggcgaccgagctcaccgcgcgcgaaaaggaaatctgcgcccgcatcggcccggcgctgcgcgaacgcggcttcttgcttgtcggcatcgacgtcatcggcgactacatgaccgagatcaacgtcacctcgccgacaggcatccgcgaagtcaagaaattcggcggcgccgacatcgccagcctgttgtgggacgcgatcgagcgcaagagcgcgtaaggcggacgacggtctcggaagggcggcgcccgtgaggtgccgccgaccgcaagcgcggccacaacggcgccgaccgtcagcgagggcgccacgtccatgaccgtcaccaactctgctggccgagcttatccttgaaccttgcattgatatgactgtcccgagtgtccagtcacgcctcaacgcgtccggcatcgatggccgacgcgggcaatcgacaccgcccctcaaaacaacgactgctgcaccggcttcggcggcgccagtttcacaccctccagctccagcatgcgggccttcgacacggatccgccgggggccgagaagccgccgatcttgttgccggcggcgagaacgcggtggcaggggatgatcagcgcgatggggttcttggccatcgcctggccgacgtcgcgggcggcttcggggccgtggccgagctctctggcgagcgcgccgtatgtcgtcgtttcgccccagcgcaggcggcgggcggcgacgtagatgtcgcggaagaaatcgtcctggccgacgagatcgagcgcgagatcggagaagtcggtcggctcgccggcgaagtagcgcttcacggcggcgatggccagcgcgatgtcaggcgtcggggatgccggctcggcatcggggacacggcggagcagcaggcgttcggtggcgtccgcgcctgaggtcggcaactggaagcgggtgatgccgatggcgttccaggcgatgccgcagaagccgcccgcggtttcgaagatggcgtaatgctgtgcctgctgggccatgggtctcgcctcccgatatcgaagcttgtcggccataagatcggcctcacccgaaaatcgtgcctgccggccaggaattcaacccgtttcttgcgctgtcgtttcctgtgggctcgtttccggcgcagtcgcagccagcaagccgtcagccgcgcgcctgccggggctcggcctcgtcctgcggcggctttgcgagatccgggcgcaatttggcgaagacggcgtcgaagccggcggcgatcttttgcggctcgtagcggcgtgcggcctcgagcgcggcgcgcgacagcgccggaatggtctcaggccttgccgccatggaggcgatctctgcggccagcgccttgtcgtcgccgggatcgaacagatagccgtccttgccgggatcaatggactcggggatgccaccggagcgggcgccgatgacgggaacgccttgcgcgaaggcctcgatcaccacgcggccgaagggttcgcggaagagcgagggcaccaccagcacgtcgatctgggggaagaaatcctcgggcttggtccagccgagaaacttcgtattctcgccgggaaatttctgcggcaacgacttcgagtaatcgctcttggcgctgccggcgatgacgaagcggacgttctggtcgttgaccagccggtgggcggcgcgggcgagcgtatcgaggcccttgaccggatcatgcacgccgatgaagccgaagcgcatcggtccctcgggcgccttgcgcggctcgccgcgggcgatcggcggaacggcgccgggcacgcggtgggtgctggcgttggggaaataatcatgctcggtgtggcggccgatgatgaaatcggtctcgccgatcacggcatcgacatagcgcgagaagaatttcttgccataggaagagacctggcaggaggaacaggcacgcacgcaattgtcgtcgccgcgccgcatgctggccttccagcagaggagaaaggcgctgcgcaggatatggcagaccggcacgcctgaacgcttggccgccgcccaggtggcgacgttgatgttttcgatgctgtcggtcagcacgatatccggcttgaagcggcggatttcgcggcgcatgacgaggtaggcgcgcggattgaaattctccagcgcgtgccagatcagcttcttccagcccggccgcggaagccggtaattccagtcgatgttcagcgtcttcaggcggcgcacgggcacgccgtcatagatctcgcgccggtcctcgccagagacgttgacgacttcgaggtcgtggccagccgcgatcaggagcttggcgaccatcatcgccgaaatcgggccgccgccatcgataaagggcggaaaggccgcgcaggccatcaggatacgcatgaacagactcccggcacagatatcgcgcgttcttcttctgctcttgatttccccgattcacctgcaaccatcgccgcattgcctggatagacagaggcggggcggatactccggtggttggtcgtgcacgaacagaacacgcaatcgtccttcgatttcgcaaaccgcaggatgcaccggcaatcgtcaagatttggcaaagacaacctgtttttcgcgatcctgccggatcccgatgcgtgccaggcctgccttgagatacaggcgcgcctgcagagggagcatggcgggctgctttctcccctctcgcccgagcggctgcacgtttcgctctatggcgtcgccagcgccgcgaagatcaaggacgagatgatcttcgcggcttgccaggcagcgtcggcggtcaatgcctgccggttcgacctcagcttcgatcatgtcgcgacgttcagaaccgcgtcgcgcaacgccatcgtgctctcgggcaatggcgggcgggaactgctgcggcagttgcatatccggatcgggatcgagatgaacgcgattggctgcgacccatatgtgaaagccgatttccaaccgcatgcgacgctgttttatgccgatgagacggtggctaagaccgtgcttgccgcgccggtcgtcatgcccgcgcgggagttcgtactcttgcacaagcggcggggtgagccgacctacgagcctgtcgcgagttggccgcttcgcgaacgcggctgaccgcttgcctcacgcatcggaacgcgcttaaagctgctgcagcaatgacagcagcagcggagacaaagatggataggtccgagatcatcatttcaggcgatacggcgggaatggagtggcggctgccggtgctgcgcttcaagggtagcgacccgaaggcgccgaagatccatatccaggcggcgctgcatgccaacgagctgccgggcacggcgctggtgcatttcctctgcgaaaagctgcgcgcggccgaaagcgccggcgaaatccgaagcgacatcacgatcatcccgcatgccaatcccatcggcgccgcgcaatcgcatttcggcgagctgcagggccggttcgatctcagcacgcgcaccaatttcaaccgcgagttcccgctgatctcggtcaaggatcgcgacgggctggtggccgagcttgatcgctacaacgccgtcgaccggctgaagcggcagctgatgcacatggcgctcgaagcggacctggtgatcgacctgcattgcgacgatgaatcgctgcaatatgcctatatcgacgaggccttctggccggaggcggccgatcttgccgcggcactcgacatggaagcggtgcttttgtcggatggcgaaagctccgccttcgaggaggcgatcggctatgcctggaagcacgagacgcaagagaagaagacgcggttgccgggcaagctctcggtcaccgtcgagcttcgcggcatgcgcgacgtctatcccgagatggcgaggaaggatgccgaggggctgttcaacttcctcgccgcgcgcggcgccatcgcccgtcaagtcacgcttgcgcccttcaccggccctgccgtgccgctcgacaatatcgagatgatccgcgcgcccgaggccggcaccgtgctcttccatcgaaacatcggcgaggagatcaaggaaggcgagctgctcgcgaccattctcacccggcccggcatggccgatggcgcgatcgaggtgcgcgcgccgcaggcggggcttatcgtcacccgcacctcgtcgcggctggtgcgccgacgcgccgacctgatgaagatcgcctgcggagcggccagcaaggtcgtgcgcaagcccggcgcgctggaaaactgattgggaagaaccgaatgaccgtcaccatctatggcatcaagaattgcgacacgatgaagaaggcccgcacctggctggaagagcacgacgtcggctatgatttccacgactacaaggcgtcgggcatcgaccgggcgcatctggaaaagtggacgcaggaagcgggctgggaaacggtgctcaaccgcgccggcacgaccttccgcaagctgccggatgacgcccgcgaaaacctcgatcgcgagaaggcgatcgcgctgatgctggagcagccgtcgatgatcaagcggccggttgtcgaggccgacggcaagcttctggtcggcttcaagccggagatttatggcgggttcttcaagggctgatcaaatgtcgaagacgacgcgggcgacacaggttctggaaaaggccaaggtggccttcaccgtccacacctatgagtacgacccgaacgccgagcgcatcgggctgcaggcggccgaagcgctcggcgaggagccgcaccgcgtgctgaagacgctgatggccgaggtggacggcaaagcagtctgcgtcgtcgtcccctccgaccgcgaggtcagcatgaaaaagctcgccgccgccttcaagagcaagtcggcgaacatgatgaagccggcggatgccgagcggctgaccggctaccacgttggcggcatcagcccgtttggccagaagaagctcgtgccaacggcaatcgaggaagcggccatgagcgaagccctcgtctatatcaatggtgggcagcgcggattgcaggtcaggctggcaccgaaggatgcgctcgacgtgttgaaggcgacggcggctgcgctcgtcgcctgattgtcttccagcttcaatttcgccgcaaaggggtctaaatctctagccctgtccgttcgtttcagaaggtgatcgatcatgaattacatgccgcagggcgataacgccgtggaccccatcaagctcgacaagctcgccgaagtcgccgtcaaggtcgggctgcagctgcagagcggccaggatctcgtgatcaccgcgccggtcgtcgcgctgccgctcgtacgccagatcaccaagcatgcctatatggccggggccggcctggtcagcgccttttatgccgacgaggaatcgacgctggcgcgctatcaatatgccaatgacgcgagcttcgaccgggcgtccggctggctctacgagggcatggcgaaggcctatgcgaacggggcggcgcggctcgcggttgccggtgacaatccgatgatgctctccgagcaggaccccgccaaggtcggccgtgccaaccgggcgatgtcgacggcctacaagccggcgctcgagaagatctccaatttcgacatcaactggaacatcgtctcctatccgaacccggcctgggcaaagctggtgttccccaatgatcccgagccgatcgcggtcgccaggctcgccaaggcgattttcgccgcctcgcgcgtcgatgtcgaggaccccatcgccgcctgggcggagcataacgccaacctcgcgaagcgctcgagctggctgaacggcgagcgtttcgccgccctgcatttcaccggcccgggcacggatctgacggtcgggcttgccgatggccacgagtggcacggcggcgcctcgaccgccaagaacggcattacctgcaacccgaacatcccgacggaagaagtgttcacgacgccgcatgcgctgcgcgtcgagggttacgtgtcgagcaccaagcctttgtcgcaccagggcacgctgatcgataatatccgcgtcaagttcgagggcggccggatcgtcgaggcgaaggcgtcgcgcggcgaagaggtgctgaacaaggtgctcgatacggacgaaggcgcgcgccggctcggcgaagtggcgctggtgccgcattcctcgccgatttccgccagcggcatcctgttctacaacacgctgttcgatgaaaatgcctcgtgccacatcgcgctcggccagtgctattccaagtgcttcctcgatggcgccaagctcagccaggaccagatcaaggcgcagggcggcaattccagcctgatccacatcgactggatgatcggctccggccaggtcgatatcgacggtatcagggccgacggatcgaaggttcccgtcatgcggcagggcgagtgggcgtaacggccggctcggtcaccggctcgacgctgaccttaacgtccaatctggcgggcatcgagacccgctgactgaaccagacgctcgccagcaccattgcgaagccgcaaagctgggcgggcgtcagcacctggccaagcgccagccagccgagaagcgtggcgacgacggggctgaggaagcccagcgaggacgcggcggaaggctcgatgcgggcgagaccgcgaaaccacagcatgtaggtgaaggcggcgccgatcaggccgagccacaggaatgcgagcaggctttcaagcgtcggcggcggcagtgccggctcggcgatcagcgccaccggcaccagcagcaggccacccgccgtcaactgccaggcggtgaaggtgaggctggagacatcaggcgtccagcggcgcgtgagcaccgtgccgaaggccatggagacggcgccggcaaggccggcgatcacgcctgtcggatcgagcgccgcgcccggcgtcagcaccagcagccccacacccgccatgccgaaaaggccggccaaaaccgccagcgccttgatcggccggccgagcacgaagcgcgagagcacgatcacgatcagcggctggatggcgccgaccgtcgcggcgacgccgccgggcagccggtaggccgaaacgaagagcatcgtccagaagaacgagaagttcagcgcgccgagcacgagagcgcgaaaccaccagataccctcgggcagcctgcgaaccaccatgagcagcaaaagccccgccggcagcgcccgcagcatggctgtcgtcagcggatagccctgcggaagataggacgtcgtgaccacataggtgctgccccatatggcgggcgcgagcgcggttgccagcacgtcggcggcgtaggtcgtatttttcttcacatcaagtatctctacctcaagataaatcgaccctatgccgatttatcttgacgtcaagacacatcgcgatagagctcattcaacaaggagtgaacagatggaccgcgtcgacaggatactgcagcaatgggcccgcgagcggccggagctcgagacccggtcgatgggactgctcggacgcatgaagcggctggcgacgcatgtcgggcgcgaggtcgaacaggtgctgcagagccacggcctgtcgtcatcggccttcgacgtgctggcgacgctgcgccgctccggcgcgccttaccggatgtcgccgggcgacctgctcgagatgacgatggtgagctccggcacgatgaccaaccgcatcgaccagctggagaagtccgggctggtggagcgcgtgatcaatccgcacgaccggcgcagcgtcctgatcgcgctgaccgacaaggggctcggcatcatcgacgaggcggttctcgcgcatgtcgccaaccaaaagcggctgaccgaaacgctcgatgacgacgagaaggcggcgctcgacgcgctgcttcggaagtttctggcggcgttcgaatagagcgacgccgccggccgtgaatttacctgtagtagatgacgtgggcgccgttcagcgcccgctgcacctggatgacattcttcagtgcgatgccgcgatcggcgatcgcctgcatcaggcgcttgtcggcgctgacggttgcctgcgcctcgcgaatgcctgagggcatggggtggcgcagcgacagcggcagcggctggtcgcgctgcgaggccgacgtgatgcggatggccgtgacgccgtcattgtaggccttgccgaagacgaactccgacaccttcgactggcccgccatcacgggcgcggcgggcaagaaagcggaaagcgcgccggcaacggcgccgaccataagcagagcgggcaaaattcttttcaacgcattgtctccacgtcgcatcatcaaagcggcgcaaaacgccgccctttcaatccacataggcgtcctgcaagattttttaaacgcccggatgcgcgtgccgcaccactatttggtgatcgcccgatgccacgcatcacgccgatgacgtcagaacaggctgccctgtttcggcggcaccgtcgggtcggctgtcttggaggcggccggcctgggctcggttgctttcggctccgccgatctggcgccgcgcttgcgggcgcctgccggcggttcgccgccctcggtggtaatggcaccgatgcggccgtcggaaaactcgatcgagatgcccgatcccgccgacaacatcgccgcctcggagaccgggcggttgtcctcgtcgcgaatgacggcatagccgcgtttcagcacgttcttgtaggagagcgattgcagcatgcgctcctgcgcggagagttcgccgcgcgcccgcaccagctggtggcgcaccgccgtgtcggcgctgcgcgacaggttggcgaggcggtcgcgcatgcgcgatgtctggctcttcagccgggatggcagcgccgccagtgccgcgtcggcgcggccgatgcgcgatttcgagcggtcgatcagccgctcgacggtgcgctcggcccgcgtcatgcgctcgtaaagcatctggcggcgctcggcgatccggttcgacagcatgtcggggcgcagatgcgccgccgtgcgctcgaagctgcggcgcttgttcagtgtattgagctcgagcccgcgaccgaggccggatgctgcctcatcgaagcggcgacgcggcagcgccagaagctggtcgagcgagggcagcgcccgcaccagcgcccgcacctgctgccggcgctggtccatctgccgcagcgtgctgccctgcagcctggccgaaagacccgagagctgcgcctgaagctcggccttgaccggcacggccatttcggcggcccccgtcggtgtcggcgcgcgaacgtcggcggcgtagtcgatcagcgtccagtcggtctcgtggccgacggcggagatcagcggtatccggctttcggcggcggcacgcaccacgatctcgtcgttgaagctccagagatcctcgaggctgccgccgccgcgcgcgacgatcaggacatcgggacgcggtgtcggtccatgcggctcgaaggcgttgaagccgcgaatggcgttcgccacctcctcgcccgagccctcgccctgcaccttcaccggccagacgacgacatgcacggggaagcgatcggagatgcggtggaggatgtcgcggatgacggcgccggtgggcgaggtcacgacgccgataacgcggggcatgaagggcagcggccgcttgcgggcgggatcgaacagaccctcggcgccgagcttgcgcttgcgctcctcgatcagcgccatcagcgcgccggcgccggccggctccagcgtctcgatgacgatctggtatttggaggagcccggaaaggtggtgatcttgcccgtggcgatcacttccatcccctcttcggggcggaccttcaggcgcgaaaagctcgtcttccagaccaccgcgtcgatgcgggcgcggtcatccttcagcgagaaataggcgtgtcccgacgagtgtgggccgcgatagccggagatctcgccacgcacgcgtacctggtcgaaggccgtctcgacggtccgcttgatcgaacccgacagttccgacaccgaatattcggtgagattgctcggcgaatcattgtcgaagaagctgctcatggcgcagttctagccgaagaaccgcgtgagcgcagccccgtgagcggggaggtttttcgcggcttcggcaatgtccatcactccgctcggcgaaaacaatcattccgtttcaatgacttgatgagagaacaaggccacaccgcgcgtcgaagcggctttcgattttccccgttttgcctgagggcgccatgattgcacgagcaaccaaggagcttcccatgtccgatcgctttgcctcccacaccccctcgctgacaggcccggccagcacgggcttcgccatcacgcccgacgacacgctggcgctgccggaaaccacgcgcgcgctttatgtcggcttgggcggcagccttgcggtggagatggcatccggcgcggttctgacgttccagggcgtggccgacggcgcgcttttgccgttgcgggtggcgcgggtgcgcgcatccggcaccacggccagcggtctcatcggacttgtctgagcgcaaaatattcggaaccgcgaatattgccgaagcgttaattgtccgtcaaaagcagcggacgtatagtgaggtgattcgggagacgctgatgattgctctgatcgcaacggcacttggcatcgcgacagctccgatgcgcaatatcttttccatggttctcgtgggcttgctcatctgcgcaagctatatctgcgccgcgcttctcgggccgaccgacatcatcgatctcgcggtcgccatcgtcttctacaatatcagcctgctcgcctgcctcctcggcctgcacctgatcgggcgtgcccgcaagagagcgcgcctcgtctagcagtctgccatccaccgcccgtcatcgcgatccgctcggcacataggtgaagaactgcaccggcgagccctcgggccttggcagcgccagcaggtagggcgggacgttgcccttttccagctgggcgtagaggccatccggcttcatcctggcgatctcgcgggtctgcgggtaatcacggcagaaggcgagggtggtgacaccggcgccgcggatgaaggcttccgcctccgtcggcgtcgccagcccgatatgcagctccgtcagcatgccgccctgattgcgatgatagggggccgacaggatacggttgcgggtgaagcgcaggatccacacgcccatatccgatggcgcggcgacgaggccgggcggcaggtaggccagcggcgcgatcgcctcggccgagttgcagctgggcttctccttcgccgcggccagttcggcctggctgttgtcgacccggctgctgataaagccgccgaccagaccccagacggatgcgacgctgaggagcacggtcaggatatagcccagcgcggcggcgctgttttgcctgttggcattggagacgcggcgcatgtcgatgatcagcatcgcgagagggaagatggcgagctgattggagaagctcgagccccggatctgaacgaccgcgatggcccagctgaggccgagcaggcacagcaggatgagatggatgcgcacgcgatcggcatggaagagccggaagatgcagacggcgatgccgaacaggcccgtcgcatagaagaagccgatcgtataggggtcctggcgcatggagccgatgaaggactgcgcctcctggatattgttgagccagagatcgatcagcatcgggtcgagatcggacaacgggttgcgcaggcactgcggcgcgatcaccagcgccgatgccgccacggtcgcgccgacgccgccaagcacgacgaaacgcatcacgcggcccataccgctcgccaacgcggcggcgaacagcaataggccgccgccgatcgccgccaggctgtaatagccgagcgaaaggttgtcgcaggtcacggtcgaatagagcctcggcggcaccgtgccgaagaacatcaggctgatcgacagcgccaatgtcaggccgaaggccttggcggccgaggcgaagggcttgccgtcccaggcccatgcaagcgagacgatgaggcagacgccggcgacgaagggcgtggtctcggccccgatcgcaatcgccagcgccgccgaaaatcctgcgatcgcgtagctgacaggccggtgcctttcgtcgagaagcatggccgtcatgatcgccacgagggcgaactggacgttgtgatgatcgatggagcccggcaggaagcgattgctggcgaccagcaggaaggcggtgagagccagcgcgatatgcatgccgaacacgccaccgacacgccggccggcaaggcccatgccccataggctgggaacgagaatcgagagcggccagacgaacagcgccgcggcctcggcgcgctgcgccggcaggacatatccgaagagcttgatcagcgtggcgatcggcaggtctatcagccgcgaccagtgcatcagcgtgccgttgccgagacccatgcggtactgcatgaggtcgaaccagctttgcccgttcaggaaatcgcgaacctggaccagccgcatggcgtcgtcgttgtcggcgccgacatagtccttggcgttgggaagatggagcgccaggatggcgatcaccagcagcgcgccataggcgaaaacgcagggccagaggcgcgtcgcctgccgttgcagcctttcgcgcagggatatggatgtcggttcgccagtcatcggggcaacggtcgccatgaagcatatctcgtcattgcatgcggcgagactttacggtcagcctatcaagaaagcgtaaaatcaaggaacttgaggtttcgcggccggcgctcgaacaacgccgcccgctcctcataggcacttgttaacggccctgctttagacttgccgcaaattcctcctgacgggtgtgatcatgactggatcgcgtatcgacaatctgagcgtcgccgtgctgcttccctgctttaacgaggcggcgacgatcggggctgtcgtgcgcggcttcaaggcggcgctgccggatgcggctgttcatgtctacgacaacaactccaccgacggcacggcgctgcgcgcgatgctggcgggcgcccatgtcgtccgcgagcgacgccagggcaagggccatgtggtgcgccgcatgttcgccgatatcgacgccgacatctacatcatggccgacggcgacggcacctattcgcccgaggacgccgaggagctgatccgcacgctgctgtcggaacgcgccgacatggttgtcggcacgcgccgcggcgtgcacgacgacgccggccgccacggccacgccttcggcaaccgcatcttcaacatcctgtaccgcaccatcttcgggcccgacttcaccgatatcttctccggctaccgggtgttttcgcggcgtttcgtgaaaagcttcccggcggtctccgccggcttcgagatcgagacggagatgtcggttcacgcctcgcggctgaagctgccggtgagcgagctggagctcgactacggccgccggcccgagggctcgcactccaagctatcgaccttcaaggacggcgccaagatcctctggatgttcgccatgctgatgaaggaaacccgccccttcgccttcttcggcatcctgagcgccctgttcatgacggcgagccttggcttcatgacgccggttctcgccgagtatttccagaccggcctcgtcaaccgcatgcccacctgggttctgtcgatggcgctgatgatgatctcgttcatgatgtttaccgccggcgtgatcctcgattcggtcgcccgctcgcgcgcagagcagatgcgcgtgcagtatatgagcctcgatgcatcacacctcctgggcaacggctttgcctccgagctcgaagagatcgacattcgcaggcagccctctcaggcaggtgccgcgtgaagaaactgctgcgcttcggcatcgccggcgggctgggcttcatcgtcgacgccggtgtgctcatgcttctgttgcacacaacgccgatcggacccttcatcggccgtctaatcgccatcgcgcttgccatggcgacgacctttgtcttcaatcggaccttcacattcgagcgctccggagattcgctggctgccgaagggtttcgctacggctcggtcgggatcacggccgcactggtcaattacgggctctactcagcgctgcttctttccatgcccgacctgcagccgctggcggcgatggtgttcgccaccgccgcggcaactgtcttcagcttcttcggctactcgcgcttcgtcttccgcgagaaataatcaaaccgtctcccacccgtccttctcgctggcgcgatagatggcgtcgatgaatttctggctgagcctggagctttccagcgacacgatctcctgctcttcgccccttgctgcgcgcgcgaaagcttcggcctcgcgcttgtactggcggctgtcggggaagcggaaggtggtggattcgttgtggctgcggttgctgagctcgatctcttcggcgccccagcgatcggcgttgaaaggcgatttcacctcgatgaaaccttccgtgccgtggaacaccatgacctggcggttggccatctgcgtggagatgtagaagctgagctcgaagccgccgaagtccgccttgacgctggaatagatatcggtgccgaaatccggatcgcggcgggtgacggcctggacgcggcgcggctcctcgccggtgacgaagcgggtggtgatggtcggatagacgccgatatcgggcagcgcgccgccgccgagttcaggaatgttgcgcatgttgccggggtcgcggttgaaataggtgaacgcgccctgcacatgcacaagcgtgccgatggcgccgtcgcggatcagctggcgcaccttcagccagaccggcgcgtaggtgaccatataggcctccgtcaccagcaccttgttgcggtcgcgcgccgcgatcaggctgtcgatctcgtctgatttcagcgcgataggcttttcgcagagcacatgcttgccggcatccgccgccttgatcgtccactcgacatgctgggccgtcggcagcgggatgtagacggcgtcgatcaggtcggaagccagcatctcctcgtaggagccgaaggcatgcggcaccgagaagcggtcggccatctccctcgctctcgccagatcacggctggcaattgccgtgacgacgcagttttccgcatcctggatggccggaaccacaagctcgcggccgatcttggcggtcgacatgataccgaagcgcagcatggtcatttcctctcccacattgaattttgaggcgagcttagagacgcccggtccgcggtgcaatgccccgatcacaattcacggcgctggtcacggcgctggttttcatcggtcccatcgcgcactaggttagatcacagcggcgtcctgccgcggtccgaatttcaatggattgaagatctcaggagcatctgatggaattgcgtcgccttggaaaaaccggcctttcggtcgcgccgatcgtgttcggcggcaatgtgttcggctggacggctgacgagaagacctcgtttgatattctcgacgccttcttcgacgccggcttcaacaccatcgataccgccgacgtctattcggcctgggtgcccggcaacaagggcggcgatagcgaggagattatcggcaagtggctgaagcagaacaaggtcgcccgcgacaaggccgtgatcatcaccaaggtcggctccgagatgggcccgggcaagaaggggctgaaggagcagtatatccttgaggcagtcgaagcctcgctaaagcggctgcagaccgattatatcgacctctacctctcgcactggccggatgccgagacgccctatgaggaaacgctcggcgccttcgccaagctgaagcagcagggtaagatccgcgcaatcggctgctccaacctcgacgccacgcagctgcaatcctccttcgacgccgccgagaaggccggcctgccgcgctacgacgtgatccagcctgagtacaacctctatgaccgcgcccccttcgagggaccgctcgccgatctctgcgtgaaagaggatatcggcgtcatcacctatttcagcctggcggccggcttcctgtcgggcaaataccgcagcaaggccgacacagaaggcaaggcgcgcggcggcaaggcggccggctatctcgacgacaagggcctgaagatcctcgccgccctcgacacggtcgccgccgagaccggcgccaagccggccgagatcgcgctcgcctggctcctgcgcaagaagggcgtcaccgcgccgatcgccagcgccaccagcctgtcgcagctcgacagcctgatgaaatcggccacgctttcgctgagcgacgaggcgatggcgctgctggacaaggcgggcggctgagaggcaggcaggcgacagtcagacgcccgcctcatgcaacctgtccagtgacttgagccggacagcagtgggcccgtcccgagcatccatgcacgccgcaacgagttcgacgtgcatggatggcccgcgcaaccacgggctccccacatcgcccggccgccgaaaacaccccgcgatcctccttctccccacctttgttccaccgatgcaacccgctgcaaccgcgccacagcgctggcgcgcagttgttcatttattgttcttgtttcattccgatttctatgccagattgcaatccgcgaccatgatgggtcgcgatttcaggtgcaaggggttgcgccacaggggatctgggccgaggggttgggcatggtggcacgcgtcagcacggttgcattccagggcatagaaggggttccggtcgaggtccaggtcatggtcgcgcccggcaagctgatcacccagatcgtcggccttcccgacaaggcggtggccgaaagccgcgagcgggtgcatgcggcgctgcatgcctccggtctggcgctccccgccaaacgcgtcaccgtcaatctcgcgcccgccgatcttccgaaggagggcagtcacttcgatttgcccatcgcgctcggactgatggcggcgctcggtgccattccggccgatgcgctctcgggctatgtcgtcatcggcgaactcaatctcgatggtacgatcgccgccgtcaccggcgcgctgccggccgcgatcggcgccaatgccatgggcaagggcctgatctgcccggccgagagcggccccgaggccgcctgggccggtgccgggctcgatatcctggcgccgcgcagcctgatcgcgctggccaaccattttcgcggcacccaggtgctctcgcgccccgagccgtcgatccgcgccaccgccgccaatcttcccgatctcgccgatatcaagggccaggagagcgccaagcgggcgctggaggtggcggccgcaggcggccataatctcctgatggtcggtccgcccggttccggcaagtcgatgctcgccgcccgcctgccgtcgatcctgccgccgctttcggccgccgaattgctggaggtgtcgatgatccactcgatcgccggccaactctcgggcggcaagctctccgaccgccggccgtttcgcacgccgcatcattccgccaccatggccgcccttgtcggcggcggttttcgtgcccgcccgggcgaggcctcgctcgcccatcacggggtgctctttctcgacgagtttcccgaattctcgccgcaggcgctcgatgcgctgcgccagccgctggaaaccggcgaatgcatcatcgcccgcgccaatcaccgtgtcagctatcccgccaccatccagctggtggcggcgatgaacccctgccgctgcggcatggcgggtgagcccggtcatagctgcgctcgcggcccgcgctgcatggccgactaccaggcccgcatctccggcccgttgatggaccgcatcgatatcaggatcgacgtgcccgccgtctccgccttcgacctgatccgtccggcgcccgccgaaaggagcgccgacgtcgcccgccgcgtcgcccgcgcccgtgacctgcagcgagaccgcttccgcatcgccggcctcggcgagaccggcaccaacgcccgctgctccaccgcgatgatcgagacctacgccgctcccgatgcatccggcctgcaattgctgcgcgacgccgccgaaaagatgaaattctccgcccgcggctaccaccgcgtcctcaaggtcgcgcgcacgctcgccgatctcgacggcgaggagatggtcggccgcatccacttggccgaggcgatctcctaccgcatggcgggcgagcggctgacggcggtggcgtgaacgggcaggggtaaggctggggggagacagagaggtttgatctgcgggtctttgagcgccgcgccattctccgccctcattctcgcccttgtggcgggaatccagccggcgcgcgtccgcgcggcgaagagaggctttttgcgatcaaggacttgatcgcgctggacccctgtgacgggcacaggggtgagggagcctttgtaggcccgcgtgctgaccacctctgaagcaagggcgccccgggccggtttcccggcgcatcccaagcagtctaagggcgccgaagcgccctccctgatgtcgaactaagctgatcctcagccgccgaggccctcgaacagcgccgtcgagaggtagcgttcggcaaacgacgggatgatcaccacgatggtcttgccggcgttttcctcgcgggagccgatcttgatcgccgctgccagtgcagcacccgaggagatcccgaccggcacgccttcgaggcgggcgacgtggcgggcggtttcgagcgcggtggcgctgttgatggtgacgacctcgtcatagatgtgggtgtcgaggatcgcgggcgcgaagccggcgccgatgccctggatcttgtgcggtcccggcacgccgcctgagagaaccggcgattcctccggctcgacggcgatcaccttgatctccggcttcttcgacttcagcacctggccggcgccggtgatcgtgccgccggtgccgatgcccgataccaggatatcgacggtgccatcggtgtcgttccagatctcctcggccgtcgtcttgcgatggatctcggggttggcggggttttcgaactgctgcgggatgatcgcgtccggcagtgtcgcggccagttcctcggccttggcgatcgcgcccctcatgcccttcgcgccctcggtcagcaccagctcggcgccgagcagcgccagcatcttgcggcgctcgaccgacatcgtctccggcatggtgaggatcagcttgtagcccttggcggcggcggcgaatgccagcgcgatgccggtgttgccggaggtcggctcgaccagcgtcgtcttgccgggcgaaatcttgccttgcgcttccaaggattcgatcatcgccacgccgatgcggtccttgaccgaggcgatcgggttgaagaattccagcttggccagaaggttggccttcacgcccttttccttggcgagcttgtccagtcgaacgatcggggtgtcgccgatcgtgtccgtgatcgaggagtagatgcggccgcggcccggtttcttcgacatgataaggctcccttgatgaaatatcctttgagaatagggtctaagccgccgctcgaccagagtagcttcacccgccatgtcggtggttcagagaaaaaaccctttgtgaaccacgtcttgccgaatgattttttcaggccgcgcgggtggcgatgaaggcggcggtgcccgccagaatgctggccgccacccggttcaacgcctgcagcgcgcgtggctgtttcaaaagcgtgcgcgcccgtgacgcaagcagcatataggggatcagcaccaccagcagcacgacgaaggtggtgagcagcagcaggccgtattcgcgcatcccgacgctgtcgatgctgatcagcgtcggcaccagcgccacgtagaacagcatcgtcttcgggttgccgagcgtcaccagcaggccggagagaaagctcatgccgatattgctcgaccgcttggcggcgatgtcctgcggcagcaggccggcggtccacagcttgtaggcgatatagccgagatagagcgcgcccaggatcttgatgacgatgaacacctcggtgaaggtctgcgccacgaaggcaagcccgaggatcacggcggtcagataggtcatgtcgccgagcaccagcccgagccccatgaagaaggtctcgcggaagttcgagcccagcgcgcgggccacgatcgcggtaatgccggggcctggaatggcggcggcgatgaacagtgccgcagcataggcgaagagtgcggtgaacgacatgtggatctcccaatcggctgtgttctacgcctcttgccgggccgtttcaacagcgcgccggttgccgcctcgggcggataaacggcgcggacattctgtcaccgccgcctgctattgacgccgtgggtcgcggttctagatctcggttggtggcggatgcctggccgcagccggagccggcatcatcgggggacgcacacccgttccggcacccgtatcacgccgatctggcgaaggagaatacctgatgtcgacacccgtcgagaagcgcaagaccgccgcactcgcaaccccgaccgatctgaagaacaacgcaatccaggatatctccggcgcgctggcggcgcttctggccgataccttcgcgctctatctcaagaccaagaatttccactggcacatgtccggcccgcattttcgcgattatcacctgctgctcgacgagcatgccgaacagatcttcgccatcaccgacgatatcgccgagcgcgcccgcaagatcggcggcacgacgctgcgctcgatcggccacatcggccgcctgcagcgcctggccgataacgacgccgattacgtcacgccggaggacatgctggccgaactgcgcgacgataaccgccagctgatctcgctgatgcgcgagacccacgacgtctgctccgagcacaacgacgtcgccacgacaagccttctcgaaaactggatcgacgaagccgagcgccgtcactggtttctcttcgagatcacccgcaacgcgaagtaatcgccgcatcgcgcgggtcggcggttggacgcgccggtgtaggggcgtccaccgcgatcgccgtgccggtgtcgcggtccggctagaaatccgccatcggcgagagcgtcgccggccggtcaaggctgatgtcggcaccggcccggatcatgaagcgcgtgccgccgtcgatcggccgcgcctcgccctgccagccgagtttgtcgggcgaaaacagaacctcgatcgccaggggcgcgatgccgaggccgccgagaatggcgtcgagcggcgggatggtctcggcgatgatatccgacagtacgaaggtgttgttatcccccaccttccaggcgatcaccgcctgccggtcctcgagccagctcagccgcacatcgggatcgaactgggtgttgatgagaaacatcgcggaactcccgcacaccgccagcgcatcggacaccggcgtgcgcgacgtcagcgcccgcaagagcagcgcgagatcctcgggcttccacgggtcgagcgtccgcgccggcatggccgccatcgccggacccggtgccgcgccggcgtgaagatgcatcggcagcccgcgaaaaccgtagggcgtgtagagcgcgggcttgtctgtatagagcacgatcgcttcgaaaccctcggcctcgcaccagtcgagcgccttgcgggtcaggtcgcgatagagcccgcgcccgcgccatggcggccgcacggcgcccgattgcaggccggcggcgttgatccggcggccgttgatcacgacaggcatggcgaaggcggagatgttggcgacaagaagcccgctctcgtcgaaccagccgaagggcatgctggtgggatcggcgccgcccaggcgcttcagcgggtcgagatcgatgccgaacgtgtcggagagcagcgagaccagcgccgaccaagccttgtcgtcggcgaagtagtcctggcggaaggtgaggcccgtgctgtccgtcgccttttccatcacacgccggtggagccgaagccgccggcgccgcgcgccgtggtgctcgcctcggtaatctcggcgacgcgcgcctgcgtcaccggcgcgatcaccatctgggcgatgcgcatgccgcgggtgatctcgaacggctcgtcgccgagattgaccagaagcaccttcacctcgccgcgataatcgctgtcgatcgtgcctggtgtgttcaggcaggtgatgccgttcttgaaggcgaggccggagcgcgggcggatctgcccctcgaagccctcggggatctcgaagatcagtcccgtcggcaccagcgcgcgcttgcctgatgcaagcaccatcggcgcgccatcgtcgacggccgcgcgcaggtccatgccggcggcacccttggtttcataggcgggcagctcgatgtcctggccatggggaaggcgcaggagattgagggtcggtcgggcattggcgtgaatattcatgcttccattagccaagtcggtgtcgccgcggtcaaacacgaattgaaagttatccacggagtcgttagatacgcggcaactcgaaggattgaatatcatggccgaaagtctcgccgaggcggtttcccgccgccgcacattcgctatcatcgcccacccggacgcgggcaagacgacgctgaccgaaaagctgctgctgttcggcggcgccattcagctcgccggcgaagtcaaggccaagaaggatcgcatccagacccggtcggactggatgaagatcgagcgcgagcgcggcatctcggtcgtcacctcggtgatgaccttcgagtacgaaggcaatgtcttcaacattctcgacacaccaggccacgaagacttcgccgacgacacctaccgtacgctgacggcggtggacgcggccgtcatggtcatcgacgccgcaaagggtatcgagccgagaacgctgaagctcttcgaagtctgccgcatgcgcgacatcccgatcatcaccttcatcaacaagatggaccgcgaaagccgtgatcccttcgagatcctggacgaggtcgaagagaagctggcgctcgatacagctccggtcacctggccgatcggccgctccaagaccttctgcggttcctatcacctggcggacaacacggtgcgcggctccgataccgaagtgacccccaccaaggtcaacggcccgcaggccgtcgccgaccgactgccggaaaacgagcgctcggccttcgtcgacgagacggaactggcgatcgaggcctgccgcccgttcgaccgcaaggccttcctcgaaggccacctgacgcctgttttcttcggctcggcgctgcgcaatttcggtgtccgcgatctcatcaacgcgctcggcgacttcgcgccgccgccgcgcgaccaggtcgccgatgtcagaaccgtccacgccgccgaagacaagatgacggccttcgtcttcaagatccaggccaacatggaccccaaccaccgcgaccgcatcgcctttgcccgcatctgctccggcaagctggagcgcggcatgaaggcacgtctcgcccgcaccggcaagcagctcggcctgaccgcgccgcagttcttcttcgcctcgcagcgccagctggccgataccgccttcgccggcgacgtcgtcggcatcccgaaccacgggacgcttcgtatcggcgacacgctgaccgaaggcgaggcgctggtgttccagggcgtgccgaacttctcgcccgaaatcctgcgccgcgtgcgcctggaagacgcgatgaaggcaaagaagctcaaggaagccctgcagcagatggccgaagagggtgtcgtgcagctcttctcgcccgaagatggttcgccggctatcgttggcgtcgtcggcgcgctgcagctagacgttctgaaggagcgcctgtcggccgaatacacgctgccggtctcgttcgaaatgtcgcgcttctccgtctgccgctggatctcgtccgaccagccggccgagctcgacaagttcctgaacgtcaagcgcggcgacatcgcccgcgacctcgacggcgacccggtcttcctggcgcaggacagcttctcgctgcgctacgaatccgaacgcttcccggcgatcaagatggtcgcgatcaaggaatatcacgtcgccaaggcggcgtgatagctggatcgtaagcgggttggccatgcggtaggtcgctggcggtgtgccgcgcggccccctcatccgcctgccggcaccttccccccgctggggggaagagactcgttgctggccactcgcccctatcgccgtcgtcgctttaggttttaggcctgaatttcgggcaaaacgccgccacttgtcccttctccccagcggggagaagtgccggagcgtagcgaggcgatgagggggccacacggcacaacctcacccaatcgcccaatcaatccaccgcaaccatcacgtcggacgccttgaccaccgcataggcgtcggaaccgacggtcagcccgagttccgtcaccgcctcgttggtgatcgacgacgtcacgatcgaaccgccgccgatatcgatgcgcacatgcgccgtggtggcgccgagcgtgatctcgacgaccttgcccttgaggcggttgcgggcgctgattttcatgagaattctacccgttcgatggcgagcccaaccattcgccaccaaaacggcaatctcactcgccgcgcggatagcgctggttttcttccagcacgttgagatccatatggttgcgcatgtagcgttccgaggcgcgctgcagcggctggtagtcccacggatagtaggcgccgttgcgcagcgcctcgtagaccacccagcgccgcgcctggctctcgcgcacggcggcgtcgaagcttgcaaggttccagcgcttctccgcctgcgcggtcagatgcgccagcgtctcggcataggcgggctcggctgcgaggttcttcaattccctggggtcggcgtcgaggtcgaagagcatcggcgcgtccgcgtcgcagagcgtcagcttgaacttgccgtcgcgaaggccgaccagcggcgcgatcgagccctcggccgcatattccatcggcaccggcccgcgcgtacccgttcccttggcaagcggcgtcagatcctcgccgtcggtccagggcttgagcttggtgatgtcgatgccggcgagcgccgccagcgtcggcgtcacgtcgagcgtcgagaccggctggctgatgagcttcggctcccagccgggtgcggcaattgccagcggtacccgcgccgagccgtcgaagaagcacatcttgaaccagagaccgcgctcgcccagcatgtcgccatggtcggagacgaagaggatgacggtatcctcggccatgcgcccgcgcttgagaacgtcgagcagttcgccgaccttctcgtcgatataggaaatgttggcgaaataaccgcgccgtgcgttgcgcacctgctcgcgggtgatctcgaaggcgtcatggtcgcaggccttcaacagccgctgcgaatgctggtcctgctcctcgaacgggatcgtgccgacttcagggtcgaggtgcgggcagtcctcgtagagatcccagaatttgcgccgcgccacataagggtcgtgcggatgcgtgaagctcaccgtcaggcaccagggacggtcgtcctgccggcgcgagagatcgtagagtttgcgggtcgcgttgtaggcgacctcgtcgtcatattccatctggttggtgatttcggccacgcccgcgcccgtcaccgagccgagattgtggtaccaccagtcgatgcgctcgccgggcttggtataatcgggcgtccagccgaaatcggcgggatagatatcggtcgtcagccgctcctcgaagccgtgcagctggtcgggtccgacgaagtgcatcttgcccgaaagtgctgtgtgatatcccgccgcgcgcagatgatgcgcgaaggtcgggatatcggaagcgaattcggcggcgttgtcgtagacgcgggtgcggctcggcagctggccggacatgaaggaggcccgtgccggcgcgcagagcggacttgccgtataggtgttggcgaagcgcacggagcgcttcgccatggctttgagatgcggcgcgtgaagaaactcggccggcccgtcgggaaacagcgtcccgttatactggtcgaccatcaggatgagaaaattcgggcgcgccatgctgcttatatgtccttacaatatcagaggccgagggaggtcttgacggcgtccgcggccggcttgccgtcaagcgttgtgacgccggagagccacggatcgacggccgtcggattggccttcagccaggcgcttgccgcggccttcgggtcctcgccgccgaggatcgagcccatcagcgagttttccatgctgatgtcgaacttcaggttcttcatcagcgtcgccgcgttcgggcatttcgccgaccagccggtgcgcgccagcgtatagacctcggcgccgccgaaattcgggccgaaataggcgtcaccgccggagagataggtgatctggaacttctcgttcatcggatgcggcgcccaggcgaggaacaccacggcggacttgtccttcgaggcgcgctcgacctgcgccagcatcgcctgctcgcccgattccaccagcttccagtccttgaggccgaaatcgttggcgtcgatcatcttctggatgttgccgttggcgggcgcgcccggctcgatgccgtagatctgcttgccgaagtcgtcgccgaacttctgcaggtcggcgaaatccttgacgcccttgtcggccaggtagcgcggcacggcgagcgtgaacttcgcgccctcgaggttcttgttcatcacttcgatcgccttggcggcgttgaggtcgtcgatgaaggctttctgcgccggcatccagttgccgaggaagacgtcgatctcgccgtttttcatcgactggtagccgatcggaaccgagagcgtcttgacgtcgggctcgtagccgagcgccgtcaggatgacggatgtgacgccattggtggcggtgatgtcggtccaacccggatcggacatgcggatgaccttgcacgatgcgtcgtcggcggcggcggccgagccgacggcaagagcggaaagcacgacgccggcggcaagacggcggataaaggatattgctgtcatctcatttccccttttttgtcatttgatagttttattgaacaacactagcatcgtccctgtgaaggcagcttttttcaatggttcccaacaggattttttatggcagagcggccgatcgatctggggtggatgcgcattttcgcggagatcggcggtgccggcagcctgtcggccgcagccgccgcgctcggcctcacgcagccggccgtcagctaccagatccgcaggctggaagagcagatcggcgtcacgctgctcaggcgccagcaccgcggtgtcgagctcacgcccgaggggcagcggcttttcgatctggtcgccagaaacgtcgatgagatcgaccagctgacgcgcaggctgcgcagcgagaaggagcgcccctcgatccgcctgcacacggactacgccttttccgcgctctggctgatcccgcgcatgcacgccttccgtctggtccatccggatacggatatccagatcatcgccacgcagcgcatggagcggcatcgctctggcgagggcgatgtctccgtcgtcttcggcacccgcgccgaattcgggcgcgatgcgaaactgctgctgccggaaaaagtggcgcccgtctgcagccccggcttcatcgagcgcaacggcccctttgagacgcccgccgatctcacccgcaaccgcctcatccacctcgacacggcggcgccatcgccctggttcgactggcgcagctatttcgctgaactcggtgtcgggcgcgaagcctttgccgggcagggcgatctcagcttcaacacctattcgctggtggtgcaggcagcccttggcgaacagggtttggcgctcggctggatgggcctggtcgacacgctcctgtcgaccggcattctcgcgctcgccgggccaacgctggaggcgccggatcgcggctatttcctgctgcggccgaaaagccgctcgcccgggagcgacgagctcggcgcctggatgctggccgaagccggtctctgacatcgctgtcttcaggcggccagatcctgcaggaaatcgtcacaccagcgcgacacgtcgtggacggtgagataatccatcatccgctgccaccgctccttgcgctcctcgagcgacatgttgagcgcccgcgccagcgtattggcggttccctcgatgtcgtagggattgaccagcagcgcccctttgagctcgcgcgcggcgccggcgaagcgcgatagaaccagcacaccgggatcttcggggtcctgcgccgccacatattccttggccacaaggttcatcccgtcgcgaagcggcgtgacgaggcccaccttggcgagccggtacagcccggccaggatcgggcggctgagcgagcggttgatgtagcggatcggcacccagtccacggtgccgagcgcgccgttcacgcgccctgcctgttcggcgaccgtgcgctgcatctgctcgtattccggcacctccgagcgcgatttcggcgttacctgcagataggtcacgttgcgctggtgggcggggttgttcaagacgaagcgctcgaaggcgtcgatgcgctgcgtcagccccttcgagtaatcgagccggtcgacgccgatgatcaggtcgcggccctcgatgctctggcgcgccttgtgcaccatggcgtggctgacggccttgcgggcgaagttggcgaaggcttcggtctcgatcccgatgccataggcgccgcccttgaagatcttgtcgccggagttgaagcggccatcgccgagcgcgtcgcccatctcctcgcggcgcaggcagccggcgaagttctcgagatcatggtcggtctggaagccgacgagatcgtaggcggcaagcccgcgcatgatctcctcatgcacaggcatggtgaagagcacgtccgccggcggccaggggatatggtggaagaagccgatccggttcttcacgcccatctgccgcagctcggcggcaagcgggatcaggtggtagtcgtgaatccagatcgtgtcgtcgggttccagcatcggcgccaggcggtgcgcgaagaagcggttgacgcggaagtagcccgtcatctccttgcgcccgtattccgccagatccagccggtagtggcagatcggccagagcacgcggttggcgaagccgaagtaatattcctcgacgtccttttcggtgaggtcggtcagcgcataggtgatgcggccgtcctcgctgatatgcagcggacccggttccgtgtcgccgctcgatttgcccgaccaacccatccagatgccgccgcgctcctgcagcgcggcctgcagggccacggcaagaccgccggccgccgctgccgcgccgcccttttcgggaacggggacacggttggaaacgatgacaagacggctcacgcaatattcctttcaaaaacggcagtacgcaaaaatggcaatcggtaaggcgcgatcgtcaaacggccagatgcgcgatgagttcccgcagggcgaccgcggtcggcaacgtcagttgcgccgccgtgcctgatagcggcgcgccgacgcggatcgaatggccgcccagccggttggcgacgtggaacatcgcctcgtcggtgatgtcgtcgccgatggcgatcggacggcgaccggcaaacggtgcttcggagaggaaggtctcgacggcgtggcccttgtcggcgctggcgggacgaatttcgagcaccatcttgccgcgctgcagcgtccagttttcgccggccttggcgaggaatgtctccatcaacggctcgagttcggcctgccgctgcggcgccagccggtagtgggccgcgaccgcggcccccttgtcctcgatcagcacgccgtcgaagctggacgtcgcctttcgcagctccgccttgagcgtctcgaattgcgccgtcggctcggcccggtcgatccggccatccgcgcggcgcagttccgccccatgcaggccggcgatcggaaagctgtagggggcaaacagcgcgtcggcatagggcagcgcccggccggtcaccagcgcgacggcaccgtcgagcttgcgcgacagctggtcgagctgctgcggcagggcggggggcacgacaatgccatcgggcgtatcggcgagatcgagcagggtgccgtcgatatcgagaaacagcgcccagtcggcggccgaggaccggagcagattgaacagaaacgaggcccctgaaacctgctgcggcttcaagattctggatggctgcgcttgataggacatgcggtctagatgtggcaggaaaccccgatgacaaccctaaagagtcacgagcccacctggcacgggctcgccggggcgttcgcgaagctcaatcgcccggcgtgacagcggcattggccgcatagaaagccttggcgtcgcgcgtgaacaaagcggcctgatcactgcgtgtgtagaacatgtgcccgcctttatagaccttcaggccgaccctgttttcggcaagcgatgccggcaggtgatcgacgacatagcggctgacgccgtagggcgtgacgagatcgctgtagccgtgcgcgatcagcagacggaagctcggaacggcggccaggaattgcctgatatcgtcggtgacgcttgcctgcaggcgcgagcccccgccacgacggccgccccattcccactggcggttcacgtcgctgtcgagcaaagagtaggtcatctcggtcttgaagccgagttcgttgcgggcgtagtcggaaaacgcgccgccataggcccgggtgaagccgtcgagaatggcgtcgtcgccacgcgcgtcggatgtctccggaaacgcatcgggcgtcatgaaggccgcgtcataggggctggcgaccaacccgtcgctcttgccgacctgcttggcgaaggcattgccgagaaagccgcggttcttttccacgacatcctcggggatgccggtcatcgccgaaagcttggaatagaacgcctttgccgcgtcacccgttggcgccggccccgccagcgtcgtcagatattcgccgagcgcgaaccgttcggcctcgcgctgtttcgtctcgtcgaaggccttttgccgatccatctcggccgccgccagcgacggcagctccagcgccgcgccaagcgcgaactcgtccgcgccgaacatcagctgcccctcgatgagcggcgacagcatgagcgcacccgagacgatgatgccctgcgtgtccttgagcgcgctagccaccttggccgcccggaagccgccatagctctcgcccagcagatatttcggcgaggccgcccggttgttgtgggtgacgtagagtgcgatcgccttggccacgctctcggcgtcggcattcacattgtagtatttggccgcgtcatcgggcttcaccgtccggctccagccggtaccaacagggtcgatcagcacgagatcggtgaagtcgagccagctgttcgggttgtcgaccagccgggctttcgcgccatcgtcccccttcggtccgaagtcgacgatccgtggtccgacgagaccgagatgcaggaaggcggaggctgcgcccggaccaccgttgaagacgaaggtcagcggccggttgggttcgccatccttcttgacgtaagcggtataaaagatcgccgccgtctgcgcgccatcctgcccgaacatgtcgagcgttccggcggtcgcggtataggcgagcttgcggccgtcgatggtgatctcctgctgggtgatcgaatcggacggcagcagcttcaggaccccgtcgcgcgatccgccggacgacggcgctgcaccttgcgcaaaggtcagggatggggtgactgcggcgatgagcccggaggctagaacggtggccaggacaagggatcgaaagcgcacgactattcctccgcggatgccattttcgcgcggagcctagcattggctgcaccggagatggcatcaacagatggtgaaggcctcaatcggcggtcttctcgaccgtccgcgcgttcacatgctgcgcgcgcccggcgttccagccgttgatcgcggcccccgtgccgagcgccacgaacagcaccgaggtccaggcgaaactcccggtccagccgcgaatgaggccaacgatcagcgggccgatggcggcaagcagatagccgacgcattgcgccatgccggaaagatgcgccgctacgtgcgggtcgcgcgagcgcagaacgatcgtggtcatcgccgccgcgatcaacccgccctggccgatcccctgaagcacggcccagaaccagaccgtcgaaagcggcgcgaagagaagcccgagcagcgccaccacggcgacgacgcagagcgtcgcgttgatcacgcgctgatccttgccgcgcaccgcgatctgcggcgcgacaaggcaggacgccgcctgcaccatgaccgacacggaaacgatcgcgccggcggtgacgccatccatgccgcgctcgcgcaggatcggcaccagccagccgaagacgcagtaggccagcgccgactgcagccccatgaacagtgtcacctgccatgcaagcctgtcccgccacagcccctcgaccgaaaagccgctgcgcttgacctgtgttttcgtcgacagcacctgcggcagccagatcaggccgacgaggagggcgggcagggcccagatcgcaagtgctgccgccatcgagccgccgaaggcgcgctccagcggtagcgtcaagcccgccgcgccggccgcacccgcgcacagcgccatcgtgtagaaacccgtcatcagcgccgcgcggtcggcgaagtcccgcttcaccagaccgggcagcagaacattgccgacggcgatgcaggcaccggcgagcgccgaaccgatgaacagaagcggtatggaggagaacccgcgcagcgccgttccgagcgccagcagcaacagcacgccgagcagcgtccgctcggcgccgaagcgttgcgcgagcttcggcgccagcggcgaaaaggcgccgaggcaaacgacaggcagtgtcgtcagcaggctggtgcccagtgccgacaggccgagctcgctgcggatttccggcagcagcgccgagacgcttgaaaacagcggacgcaggttgaaggcgatcagcacgaggctgacgccgagcacgatccgccccgtcacgctcgttcccatcggcggctgcggctgcggcacgctgtcggcttccgcatcgatcagctgttcatcggcgtgatcgtaaagatgggcggcgtcttgcgaaggcgaggtcatgaaaggatcatccggtcgagggctgtgattacgggagccatgaagccgcgcaccgccgcatccgccttttcggcatcgccggtggcgatcgcgtcgatgatggcggagtgagcctgcatgtcgggctcgggaatatccgcgcccagcgtcgcctcgatggtctcggcgatcgaggcggaaaagaagtcgtagatctcgatcatggcgcgattttcggacgcggcgatcaccgccttgtggaaggcgagatcgcgctcgatgaaggctgtcttgtcgccgccttcgaaattgccgcggctggcgagcagcgcgcgcagcgtggcgatcgtccgtggcgtgtggcgcagtgccgccagtctggctgcctcgacgtcgagcgcgcatcgtgcctcgaagagatcgcgcagtccggcgcgccgcgccatggtcagcggcaatgcggtatccgtggtcgacagcacataggttcccgacccctgccgtgtctcgagcaagccttgcgagacgagcacccgcaccgcttcgcggaccgtgccgcgactgacggagagcatcgcggagagagccgcttcgttgggcagcttgtcgccgacagcccagcgcttggcgagaatctcggtgcgaatcgcttccgtggcggtctcagcgagattgattttcgaaagcggttgcacgagcgcctcataaagtcatctgatgactttatgaatatgctctgcgagcatcgtcgtcaatctcgggctggcatgcgagactccaaaatggaaaaagggccgcgctagcgaccctttccatgagttttggcctgtaaaccggccggaccgttatggcgatccaaggaaggcgggtttcagagcgagggctgcctcgccttcgtcaccacttccaagcccgttacgaggtccgaaatctcattagacattggatcaccttcctttcgttctgtttccgatagaggaaaggtaagagcatttcagcgggatgcaaggcctaatttggtggtaatggagattgcaaccaagggatgatattgcttgcgccgtgagcggcaaagcagcgtccgccgcgccagccggcgggatcggggaagatgggcaacctcgaccgcggcgatcggcctcgccctctcacaaggaggtgagctatgtggtctccacttagcatcacgtttagggtaagaaaaacccggaccagctggctgctagaggtccgggtcaacttcaaagcctaagcaagtggaaggcaggcgccaacctgccttccactccttgaatataagccatcccctcgttttcatcaagacaccgcgcgcaatgctggcagtacgcaccggttcgcgcgggccgtccgcaaccacgttcacaaaacaaaatgctgcattgcggaagttgatcgtcgtcaatgtcggaaaaacgtcatgttcgggttgcaagccacatccttgtttagttcttattaaccatcggattcgacaatcgtcgatgcgtttcagcattgtcccgccacgatcccggcgggttgcggagtgaatagcatgtgtcgctgggcagcctatcgcggagaacccctctatctggaggagcttgtctcgtcgcccgcgcattccctcatcgagcaatcccactgcgccacccgcgccaaaacggcgacgaacggcgatggtttcggcatcgcctggtacggcgatcaccccgagcccggccgctatcgcgacacgcttcctgcctggtccgattgcaacctgaaaagtctggcgcggcagatccgctcgccgttgtttctcgcccatgtccgggccgcgaccggcggcggcacgcggcgggacaattgtcatcccttcgtcttttccaactggtccttcatgcacaacggccagatagcgggcttcgagcgccttcgccggtcgatggaggcgatgcttgatgatgatctcttcaacgcgcgtggcggcaccaccgattccgaactgatgttcctgttggcgcttcagttcggcctgcgccagacgccgatcgcggcgatgtcggaaatgatccgcttcgtcgaaagtctgtcggagaacattctcggctccacgctggtgcgctacaccgccgccttttccgatggcaatgcgctctatgccatccgctacgcgaccgatcgcaaggcgccgacactctatgcgtctccagtcggcaagggctattgcctcgtctccgagccgctcaacgacgatgtcgatgcctgggcggaaattcccgacggtagcgcggttacgctgaccgatggcggcctcgacgtcacgccgttccagccgctcgtggcgccggccaaatcagcgcccgtcgctatccccgcctgagccgttcggcgatcagctccgcaagcttggtcgcgacatcctccttggccatgtctggccattgatcgatgccgtcgcgggtgacgatcctgacgcggttgcgcacgccgcccatgatgccggtcgcgggcgacacgtcgttggcgacgatcatgtcggcgcccttgcgctcgagcttggctttcgcattgctgtcgacatcctgcgtctcggcggcgaagccgatcaccagcttcggacgcagcgtgtgatgcccgatcgtcttcaggatgtcggggttttcggtgagcgccagcgtcggaatggattcgcctggatttttcttgatcttctggtcggacgcggatgccacccgccagtccgccaccgccgcgaccatcaccgcgatatcggcgggcagcgcggtcagcaccgcgtcgcgcatatcctcggcccgctcgacgtgaatggtcttcaaaccagcggggtcggcgatcgtcaccggcccggaaaccagcgtcacctccgccccaagccttgcaagcgccgacgcgatcgcgtggccctggcggccggacgagcggttggcgatatagcgcaccggatcgatcggctcatgtgtcggccccgatgtgacgatcgccttgcggccggcaagcggcttcgggctggtatcgagcaatcgctccgccgcggcgacgatatcgagaggttcggccatgcggcccacgccggcttcgcggctttccgccatctcgccggacatcggcccgatgaaatgaatgccgtcactattgagtgtcgcgacgttccgcttggtcgcggcgttgctccacatatgcgggttcatcgccggcgccaagagcactggccggtcggtggcaagcagcaccgtcgaggcgagatcgtcggccagcccgttcgccatcttcgccatcagatcggcggtcgccggcgccaccaccacgaggtcgcagtcgcgcgccagccggatgtggccgacatcctgctcgtcctctcgcgaaaacaggtcggtgaacacgtggtcagcggcgagcgccccgacggcaagcggtgtcacgaactgctgcgcgcccgctgtcatcaccggccggaccgaggcgccgcgctcgcgaaggcgtcggatcagctcgaggcttttataggccgcgatgccgccggagataatgaggaggatgcgtttgccgccgagaaccatgtcttccgtccaacctggaattgactggcagaaccctaagcctttggcggataataagcaatcggcgcgagctccgtcgcttacgcgtgctgccgttgcctgacatggctgaagaccgcgatcgccatgccgacacccgcgagctgcagcaaggagccgcctgcttcggcaagcgtcggaagccgctgttcgaagacgaagccgaagatcaggccgaacacggtttcggcgacgatcagctgcgcggcgagcgccagcggcaaccgcttcgaggcgatcatccataaaagcgtggcgagccacgcgccggcaagccccatgatcagcgaccacagcacgaaacgcatcaggtcgatgtcggtatagacgatgggcgtgttcagcgatgtcagcgggatcagcacgaggctgccgagcccggcgccgatgccctgcagacccgtccattgcaggatgtcgggcgcatcgggcgattgcatcgtggcggtgctggccagtccgtagacgacccagaggacgaggccgatcgccgccgatgcgatgccgtagacgatcatcgcccggtcgcccgtcggggtcgatgcgaaaacggagacgttcacccaggcgatcccggccgcgatcagcatcagcggcagcgcaagcagccgccatgaaacggaacggtcgcggaaattggcgatcatcgccaggatcacgggcatggttccgatcaccaacggcggaatggccgctcccgcgaaccgcaccgcataggcgacgctgacgaagtagccgacatagccgatgccgccgagcagcagcgctgtgatcatcggccggggcttgatactgcgtggccggaagcgcgggtgcaccatcagcgccacgctggtgagcgcgaacaggccgtatcgcgccacggtgaggtcgagcgtcgtgaacggcgcgatggcgcgcggcacgacaaatgtcagcccccacaaggcgcaggtggcgatgccgctgagaatgccgaacagcatggaggtctccggaacggatggagccgcgtgaaatggaaggaagcggatagtcgagaagctacgaatgccaccatgcctgatctcgcgccgcgacaagcgtccacctacgacatgagacgggcggaaggggacaggtgaacgcacgtcgttcgagaacggtcgagcaccgaagtggccaaaggtcgcatcatcggatggattaaatctaactgtatgattagattgaatataatagcatgtcgaggcgtctgacgcaagcgtgacattgtcgacgcgctgtggcatgcagcggatatggggatgatcaggacagttctgcgggacagggtatcggcaagcgccatcgcgctgctcgtcgcctgcattctgctgatccagggcctgatctccgggcaggcgcagggcgccatggcggcatccgccgtcgatcccctgggctcgatctgcaccatgacgggtcaaagcgccatcgatggcgtggatcgtctcgaaaacagcgacggcgcatcgcatggaaagtcgcatggcaaggccgccgattgtccgtgctcgaccttgtgccggcttgcggctcacccggcgccggccatcctcggcaccgacagcgcgatcctccacgtcgatgccatcggcatcgcccccgtcgtcctttccgccggcaacgccataacacccaccctgcgtggcctgatcggcgagccccgggcgccaccgctgatctcctgacgtccgattgccggcgcgtcaccgatgccggcttcattgttcatcgttaggagacacatcatgtccgatttcaccatcggtcgggacagcacgagcgccgccgtgcattccccttccgatctctaccgcgccgtctggcgctggcatttctacgccgggcttctcgtcctgcccttcctgctctcgcttgccgtcaccggcgcgctctatctgttcaaggacgagatcgacaacgtcctccatgccgatctgaagcgcgtcgcggtcagcgagcaggcaacacggccgccatccgccatggtggaggccgcacttgccgcctatcccggcacggcaatcaagttcaccgatcccgtcgatcccggggcatcggcggagatcaccgtcaacactgccgataagggcaatatcgccgtctatgtcgatccctatggcggcaaggttctgggctcgcttcccgatcgcggcacggtcatgtggacgatccgctatctccatagcctcaaatatttcggttccttcgcccgggcgatgatcgagatcaccgccggctgggccatcctgctcgtcggcaccggcatctatctctggtggccgcgcaagcagaccggcggcgttctcagcgttcgcggcacgccccgcaaacgcgtcttctggcgcgatacccacgcggttctcggccttttcgtcggcggcttcatcgtcttcctggcggtcaccggcatgccgtggtccggcgtgtggggcgccaaggtcaacgagtgggcgaacggcagcaacttcggctacccggccggtgtccgtatcgccgtgcccatgtcgggcgaacatatggaacacgtcgcgaagaccacctggtcgctcgagcaggcgcaggtcccgcagtcgtcgggcgatagccagggtatgacgccgatcggtctcgatgaggccgtcgccaccttcgaccgcctcggcctgcagcgcggctatgccgtcaatattccgacggatgcgatgggcgtctataccggttcggtctatccagacgatctctccaagcagcgcgtcgtgcacctcgatcagtttaccggaaagccgctgatcgacatgagctacgccgattacggaccgctcggcaaggcgctggagtggagtgtcaacgtccatatgggacagcagtacggactggccaaccagctcgtcctgctcgccgcctgcgtcgccatcgtgctgctggcggtatcggccggcgtcatgtggtggaagcgccgcccgtcaggctcgctcggcgtcccaccgatgccgtcggacaagcgggtgtttcgcgggctgatcgccatcctcgtcatcggcggcatcatcttcccgctggtcggcctgtcgctcgtcgtcatgctggtgctcgactggatctacgtgagaacccgtcgccggcgccgcgttgcatgacggcgatccggggaagcaccgcccatggcgcttccccggatcgacactcgttgcgctctttcagagattgctcatcccgccatcgatgacgagttcgctgccgacgatgtaggcggcctcgtcggaggcgaggaagatcacggtcttggcgacttcggcggcgtcgccgaagcggccgaccgggatttgcgaccggatatgatcggccatcgccttcgaatccgcctccgatgcgccgagcttgctgtagagcggcgtggcgatcgggccggggctgacggcgttgacgcggatgccgcgaccgatcagttcgcccgacagcgtcttggcgagcgtcaagagcgcgcccttggtcagcgaatagacgctggagttcggcatgccgatatgcgcgttgatcgaggtgttgagcacgatcgcggcctgcttggagaagatcggcaggagagcctggatcaggaagaacggacccttgacgttgatcgcgatcgacttgtcgaaggcggcctcgctccattgttcgagcgggccgaattccgccacgccggcattgacgaacaggatgtcgagatggccgaaggcattcttgatggcctcggcgacgacctgctgcccggcgacattgccggcatcggcctggatgacgagtgccttgtcgccgagttcggcgcgggcggcggcgacgctgttggcgctgctgccagtgatggcgacgcgggcgccctcggcgatgaactggcgggcggtttccaggccgatgccgctggtgccgccggtgatgagggcagtcttgttctgaaggcgtgacatggattgagatccttgtggggtgggctgcttgcccatgatgtgttgttggggggcggtcggcagaatgccttgctgtcctctcgcgatcaccccctccgaaaggcgaaggtgatcgatgagttgtgcgtgtcaggtgcgggtgatcgaggcgccgccatccaccagcgaggccgtgccggtcacgaagctcgaatcgtcggaagcgaggtagagcaccgagcgggccagttcgtcaggcgttgccacgcgcttcagcgcatgcaggttggtgacgaagcccttcttgtcgggcgtatcgttcatctcgcgatacatgtcggtgtcgacggcacctgggagcactgagttcacgcgcacgttcttcgggccgtattcggcggcgagcgcctgcgtcaggccgatcaggccggccttgctggcggcataggctgcgacaccggggaaggcgaagctgtagccgacgaaggtcgaggtgaagatcaccgagccgccgccattcttctccatctggccgatctggtgcttggcggcaaggaaggaggccgtcaggttgatcgtcaccgcttcggtgaatccggcttccgatacgccggtgctcgggccggcctcgccgaggataccggcattgttgaaggcgatatcgagcttgccgtagcgttcgactgatgtggcgaccagcgccttgtgataatcctccgagcgcacgtcaccggcaacggcgactgcgtctccgccggcggccttgatttcctcgaccaggctgtcgagctcggcctggcggcgggcgccgaccacgaccttggcgccttcggcggcgaatagcttggccgttgcgcggccgatgccggcgctggcaccggtgatgatggcgacttttccattcaggcggttcattcttccatctcctttttgagttggggtggcgtttgccgccccgttcgatgagtggaagatggcattttccttttgttcggattagtctccaaatagcggaactcgaattcggaaatgccgaacgatgatcaggattgagggaataacggcattcgtgtcggtggtggaatccggctcggtcagcgaggcggcgcgacggcttcgcctgtcgaaatcggtggtcagcgaaaggctggccgaactggagcgctcgctgggcggcatgctgctccaccgcaccacccgcaagctgacgctcaccgaggacggcaccgcctttctcgaacgcgccgcccgcatcgtccgcgagatcgaggacgccacggccgagatggccgagcggcgcggcacgctctcggggccgctcaggatcgccgcccccgtcaccttcggccgcatgcatctcggcccggcgctctatccgtttctggccaggcacccggagatccagctggtgctcgatatcgatgatcgccgcgtggatgtttcatcggaaggctacgacgccatcgtgcgcaacgggccgatcgtcgattcccgcctcgtcgtctggaagctcagccgcagccgtcgtctgctggtcgcgtcccccgattatctggaacgtcacggcgcgccgaagacgctcaacgatctcgatggtcacaagggcattttctacaccaatcgcggcgtctccgactggcgcttccagacgtccgatggcgccatcgtcgtgcgcgccagccaggtgctgggcatgaacaatggcgacatgatccgcgatgcggcggtggccggcctcggcatcgcgcttctgcccgccttcatcgccggcccggccgtgagcgaggggctgcttgccgaaatcgacgtcggctacaagccggaagccgaattcatctacatggctcatcccgagggccgcaatccctccgccaagctgcgcgccgtcgccgatcacctgcgcaagaccttcggcgatccgccctactgggacccatcaggttgatcagatcaggctcatcagattgccgacgacgcgagagcgtcgcgccttcagcatcgccagcccgagccgggccaccagcggcggcccctcgatcggccgataggcgacgccgtcgagcgccagatgcgcgatcgaggccggcacgatcgatacgccgagatcggccgcgaccagattgaccacggaagggatctgcggcgcctcctgcgtcacgacaagctcgaaccccgcatcccggcagccgcgcacgatatcgtcgtagaggctgagaccgaccgtgcgcggaaagaggatgacgggctcgcccgcgagcgcggcgagcggcacggtcttcagcttggccagcgggtggtgcgccggcagcgcgatcagcatcggctcgtccgccagccgcttcagcagcacatccttggggtcttccagcccgggacggatgaaggccgcgtcgatctcctgccgcatcagcttttccatcagccagttgctgttcatctcggtgagcgacaggctcacatccggccattgcccgcgaaaccggcggatcgtgccgctgacggcggtgttgaaggccgaggacgcggtgaagccgagcgccagccgcccggtttcgccccgcgtcgcccgctgggcggcaagcttcgccttctcggccgaggcaatcgcggcgcgcgcctccggcagaaacgccgatcccgcctccgtcagctccgcgccatgcggcacccggtgaaacagcgccgccccgatctcgttttccagatcgcggatctgctggctgagcggcggctggccgatgccgagcctcgcggcagcacgggtgaaattccgctcctcggccaccgcaaggaaatagcggatatggcgcagctccatcggtatctccaaaacctatcaagaaagccagtttcatatattggacaaatgatgacccgttggctagatcaaagggcgtgaaaggttggtcctcaatgccacgcgccgcagacaagcagtccgtcccctcggaaatcccctcccgtccccatctgaccgtcatcgagaatgccgcccgccagccgcttgaaaacgcgccgcaggaactcgcagcgcaagaaaagcagttcctgctgcgcggcacgccggcctacaggcgcgccagcatcgcgctttttctctcgggcttcgccactttctcgctgctctattgcgtccagccgctgatgccgatcttctccagcgacttcggcatcagcccggccgcgagctcgctctcgctgtcgctgtcgacgggcctgctcgccttcgccatcttctgcgccgccgccgtctccgaaagcttccgccgccgcagcctgatgttcgcctcgctgctcggtgccgcgctttgcaccatcgcctgcgcgctggtcccgagctggcatgcgctgctggtcatccgcgcccttgaaggcttgctcctcggcggcgtccccgccgtcgccatggcctatctctcggaagagatcgatccgcgcggcctcggcgcatccatgggcctctacatcgccggcaacgccttcggcggtatggccggtcgcgtcgtcaccggcacgctggccgagttcttctcctggcgtatcgcgctcggcacgctcggcgccatcggccttgcggcggccgtcggcttcttcctgctcctgcccgcctcgcgcaacttcaccccgcgcaagggcttcaacgcccgcttccacctcggcgcctgggccggccatatcaggagcccggcgcttcccttcctgtttgccatcggcttcctcgccatgggcaccttcgtcacggtctataattatatcggcttccgcctcgtcgaagtgccgtacaatctgaaccagaccgagctcggcctgatcttcacggtctacatcttcggcatcgccgcctcctggatcgccggcctgctcggagaccgcttcggccacttcgtcgtgctgccttctggcatcgccctgtcggcgatcggcgtggcgctgacgctctcggcctcgctgccgctgatcatcctcggcatcgtgctcctgacctctggcttcttcgtcgcccactcggtcgcaagcgcgctggtcgggcgactggccaagggcaccaagggccacgcctcgtcgctctatctcctgtcctattacatcggctccagcgtcgccggttccgttggcggctatttctggggcgccgatggttggaatgcggtcgtgatgttcacgctgacactgctggcgatcggcatggtcgccgcactcgccgccgcacggctgtcgcgccgatagcaaaaaaatagaaaaagcccgcggcaaggcgggctttttcatcattggtacgcgcgtggtagcgctcagctaaccacccaggcgatataaacaagcgtcagcgcgatcagccagagcgcgaagcggccggagcggctgtggcgggcttccgacttgccgatcgcctcggccgtctcggcatcgaagcgcaggccgttctcgctcatcttgagtagttcgtggtggaacttctcggtcttggcggcgatctcgggtgccgcttcggcaagcttcacggcggcctttagcccatccttgatatcggtcgcgatccgcttcggtccgagattgttgcgtatccattcgccgacgacgggttcggatgccttccacatgttgaagcgcgggttgaggatacgcgccacgccctcgaccacgaccatggtcttctgcagcatcaccagctccggccgtgcggccatgtcgaacagctcggtcacctcgaacagcagcgtcagcagcttgcccatcgagatcgtctcggccggctgcccgtggatcggctcgccgatcgcccggatcgcctgcgcgaagctctccacattgtggtggccgggcacatagcccgcctcgaaatgcacttcggcgacgcggatatagtcgcgggtgatgaagccgtagaggatctcggcgaggaagcggcgttccttctttccgagacgcccgacaatgcccatgtcgacggcgacgatcatgcccttgggatcgacgaagagattgccgggatgcatgtcggcatggaagaagccgtcgcgcagcgtatggcgcaggaacgactggatcagcgtgtcggccagcgcattcagatcgtggccggcggccttcaggccctcgacatcggacatcttgacgccgtcgatccactccatggtgatgacgtcgcgtcctgttcgttcccagtcgacggtcggaacgcggaagcccggatcatctcgcgtgttctcggcgatctccgaaagggccgccgcctcgagccggagatccatctcgaccttggtcgtctgctccagcgtcttcgtcacctcgaccggcttcaggcgccggctggagggcatgaagcgctcctgcagatgggcgacgagatacatcgcctcgagatcgtgggtgaagcgctggcgcacgcccgggcgcaccaccttgacggcgaccttcttgcggccctgaggtgtcatcacctcggccggatgcacctgcgcgatcgaggcggccgcgatcggctcgccgaagctgacgtaaagctcatccaccgaacggccaagagaacccgcgatattggccttggctgccccctcggggaagaaggccatccggtcctgcaattgcgataggtcgtcggcgaactcgacgccgacgacgtcgggacgcgttgccaggaactggccgatcttcacataggaaggtcccagccgctcgacggccttggagagccggtcgctgcgcttctgggtcttggcacgcttgcgcgcgaacatgccgacgaaggatttggcagccgcgacggacggcggaagctcgtcggaaggcagcgccgagacgacgccctcgcgcacgagaatccagccaacccgccagagctggaaatatgccgaaacagtgctcatgcgctcaagcctatagccggcgttggagcaatctctgccctcattcctgtgcttgtcacaggaatccagccacggcgcgtctgcgccgtgagggaatcatgtcgcgtaaaagtgtctctcgcactcccggacgggagtgcgctggattcctgtgacgagcacaggaatgagggaggaacgatttgcgtgctcattccggcttaaagcttccagccggagtgaagggcggcgataccgccggtgtaattggtgtagctgacgcgcgagaaaccggcattgcggatcatcgccgcgaagttttcctggttggggaacttgcggatggattcgaccagatactggtagggttcggcatcgccggtgatcgccttgccgaacttcggaatggcgttgaacgaccagctttcgtagacgcggtcgagcagcggcatgtcgacttcggagaactcgagcaccagcagccggccgccgcgcttcagcacgcggtaggcttcgctgagcgccacgtcgatgcgcggtacgttgcggatgccgaaggcgatcgtataggcgtcgaagctgttggcctcgaagggcagttcctcggcgttggcctcgacgaaggtcagattgtcggagagcttcttctttgccgcgcgctcggcgccgacagccagcatcgatccgttgatgtcgagcaccgtggagtgcgccatccggttcgaggcttcgatgatgcgaaacgcgatgtcgccggtgccgccggccacgtcgagcgtcttgtagccgggctccttgcgcgggttcagcgccgcgatcatcgcatccttccagacgcgatgcatgccaacagacatgacgtcgttcatgatgtcgtagcgcttggcgaccttgtggaagacgtcgttgacgaggccctgcttttcgccgcctgccacttcgcggaagccgtatgatgtttccatgccgccgtcggcggaagtgcggctgtctgacatcgaatactccaatctcttaaatcaacgcggcgaccatagcgaaatcaggcaggcgacgctatctgtgggcaacggtccggtccgcgacaccatggcgctatagcgcacatcgcgggcggttgaaacatgttcgatatagatgggttaagatgccggaattgccagaagtcgaaaccgtcaaacgcggcctcgcgcccaccatggagggtgcccgcatcgtcaaattggagcttaggcgcggggacctgcgcttcccgtttccagaggccttcggcgaaaaggcatccggccgcaccatcgtttcactgggccgccgggccaagtacctgctgatcgatctcgatagcggcgccacgatcatcgcccatctcggcatgtccggctccttccgcatcgaggccggcccgatcgccgacacccccatctccgaaaccccgggcgaattccaccatccgcgctccaaggatgaaaagcacgatcacgtgatcttccatctggaaggaccctcgggacaaagccgcgtcatctataatgacccgcgccgcttcggcttcatggacatggccgaccgcaccgcactcgacatcaatccctttctttatgggctcggcccggagccgaccggcaatgcgctgagcgccgcctatctggccgagcgcttcaagggcaaggcgcagccgctgaaaagcgcgctgctcgaccagaagaacatcgccggcctcggcaatatatatgtatgcgaggcgctgtggcgctcgcacctgaagccgacgcgcgcctcgtccaccctagtgacgccgaccggcaagccgacgaagcagctcgacctgctggtctcctctatccgcgacgtcatcgccgatgcgattctggcgggcggctcgtcgctgcgcgatcatatccagacggatggctcgctcggctatttccagcactccttctccgtctatgatcgcgaagggcagccttgccggacgcccgattgcggcggtaccatcgcccgcatcgttcaggccgggcgctcaaccttttactgccccacctgccagaagtaagcctgggcattggcccgaccgggaggaacacatgtcttatgaaacgctgatcgtcgaggcccgcggcgccgtggggctgatcacgctgaaccgcccgcaggcgctgaacgccctgaactcgacggttctgaaggaactgctgcaggcttacgccgcgtttgaaggcgacgacgccatcggcgccatcgtcctgaccggctccgagcgcgcctttgccgccggtgccgatatcaaggaaatgcatccgctcgatttcgccgacgtctacagccgcgatttcctcggcggctgggacgacgtcgcgaaaatccgcaaacccgtcatcgccgccgtctcgggcttcgcgctcggcggtggctgtgagctcgccatgatgtgcgacttcatcatcgcctcggagacggcgaaattcggccagccggaaatcacgctcggtgtcatccccggcatgggcggctcgcagcgcctgacccgagccgtcggcaaggccaaggccatggacatggtgctgaccggccgcatgatggatgcggacgaagccgagcgcgcgggactcgtttcgcgtgtggtcgcccccgatcgtctgctcgatgaagcgctcgaggcggccgccaggatcgcctccctgtcgcgcccctcggtgctgatggccaaggaggccgtcaaccgggcgctggagaccacgctggaggaggggctgcgcttcgagcgccgcctgttccagagcctcttcgcgacacaagatcagaaggaagggatgacagccttcatcgaaaagcgtaaacccgccttcaagaaccgctgagccccaaactcgtccctgggcgaaaaggcgacggttccttgaaaatgcgcgttgacgccggtcggctttagggttatatgcccgcccaaggttcgggaagccagtccggttttccgataatgctcccgcattgctgtgtaggaagtggctgcaaggcccgcggcggtagcggagtttgttcgaattcttgagagaggcatccatggccaatacaacttcggcgaaaaaagcgacccgcaagatcgcccgccgtaccgacgtcaacaaggctcgtcgctcgcgcgttcgcacgttcgttcgtcaggtcgaagaagcactcgcagccggcgacgctgccaaggccaaggaagccttccaggccgcgcagccggaactggcacgcgcagcaagcaagggcgtcctgcatgccaacacggcatcccgcaaggtctcgcgtctcgcggcccgcgtgaaggctctgtcggtcggcgcgaccgcttaagcttccgttaataaagacagctatatgattagcccggcaactttgtcgggctttttcgattccgccaagtgcccgaactatggttaatttggcgacgatttcgtgtcgagcgaatgacacaaaaaaatgagtgataacaatgacttgtgtcaggttgctgttggacgaagagactcagacctcccgctgcggcgtctaaaaggagtcaagaagcttttttctttttttctttttatgcgtgtcgaaattgccggtttcctgaatctccttgattcaaaagcgattcttttttcgctctcgtgcagcgccctaaaagtgtctccggagtcaaccggctgcgcttaattttgagtaaaattccccgttgatctccacccccgatcctgcctaaatgcctcccaacaaggggctcggacatcacctgttttaaggcttggtctgaaactgccacgtcggcgggacgatgcttttgtgtcttttgttgcggaagtttcgacctccggattttcacgcactggtgccgattgcaccgcggctgtggctgccgcggaacgggatcatctgtgcgccttttttcagggttgcacgctgtgcgtgcgatcctgggataaggaaaaagcatacgcaggcaggcaggctggtgtcgttggacgaggaacggcaccggtaggagacgggaagcaaaaagatcgcatgaagcgatcgacttcgcctccagcagtcgcctctcgttaagaggcacgcgtttgagtgaaccggccggtagtggagcatgagggtgctgctgccaggtcataagcggggaaatgatcgggcgaccaggattaggtcggccgaggaactataaggcggcaatatgcacatgaattcgatggcggcgagtgccttggacagctcggacaaggtctctcagacgttaggctctatttgcccagaagcggcgggggaaaagggagacatgaagaatgatggcatactttttgacagagccagtgcgcgcctgaaggcgcaggtcggtccggatgtctatgcaagctggtttggccggctgaagctccattccgtctccaagagcgtcgtgcggctgactgtaccaacaacttttctgaagtcctggatcaacaatcgctatctcgatctgatcaccggcattttccaggcggaagatgctgaaatcctgaaggtcgagatcctggttcgcacggcggcacgcgcaaccggcaagccggaagaagcgccggtgcaggaaccggcatcgtcggtcgcgccgatccgtcgcccggtcgcccagcaggccggccagatcgtccagcaggccgtttcggcggcgtctgcggcgcgtccggcgacctctggccagccgctcttcggctcgccgctcgacaaccgcttcaccttcgacactttcgtcgagggcagctccaaccgcgtcgcccttgcggcggcgaagaccattgccgaagccggtcagggcgcggtgcgcttcaacccgctcttcgtccactccacggtcggtctcggcaagacccatctgctgcaggcaatcgccaatgcggccgtgcagaacccgcgccagctgcgcgtcgtctatctgacggcggaatatttcatgtggcgtttcgcgaccgcgatccgcgacaatgatgcgctgacgctgaaggatagcctgcgcaacatcgaccttctgatcatcgacgacatgcagttcctgcagggcaagatgatccagcacgagttctgccacctgctgaacatgctgctcgacagcgccaagcaggtcgtggtcgcggccgaccgtgcgccctgggagctggaatcgctcgatccgcgcgtccgttcgcgtctgcagggtggcgtggccatcgagcttgacggcccggattacgagatgcgtctcgaaatcctccagcgccgtctcgatgtcgcccgtgccgatgacccgtcgctggaaatgtcgagcgagcttctgaaccacgtggcccgcagcatcaccgccagcggccgtgaactggaaggcgccttcaaccagctgctcttccgtcgctccttcgagccgaacctgaccgtcgagcgcgtggacgagcttctcgcccatctggtcggctccggcgagccgcgccgtgtgcgtatcgaggacatccagcgcatcgtcgcgcgtcactacaacgtgtcgcgccaggaactggtgtccaaccgccgcacgcgcgtcatcgtcaagccgcgccagatcgccatgtatctggcgaagacgctcacgccgcgctccttcccggagatcggtcgccgcttcggtggtcgcgatcatacgacggtgctgcacgccgtgcgcaagatcgaggaactgatctccggcgacagcaagctgtcgcacgagatcgagctgctgaagcgcctgatcaacgaatagggcgtgaccgcctgagacatcaaacggccgggagcgatcccggccgtttgcgtttggcccgcggctggtcaaggccaaggacacggcttatcggcgagcgcgtgcacgacggctgtcgctcgagccgacatcgattgtctcaaggcttgggaaagtgccgcgccgtcatcggttttgaaccgagactattgcggattgcgctggctgggcagggcgcagcgattgccgcagctggcgaccccgggaagcatgtagcgcaggcagcagagcttgcgccgctgcaccatctgcccgccttcctcgatccgtttgacgctgccgcacaacgggttcggcccgccatccggcaggcagccgcgcacgaagagcggcaggtcgggcgccgaacgcccgccattatcggcatcggtcagccgcagcgtgtagtcgatgtagacggcggcgttgttccacaggagcttcgccgagaggccgcagcgcttcaggcgctcgacggcgatgtcgatatggcccgacatcaatggcccggtcacggaaaattcgtcctcgctcgtcttttcgccgatcatgccgcgatgggcgacgccgaaggcgcgcggcaatccatcctcggtgagcgcgatcgtcatgttctcgaacgccaccggcagcacctggccggaaaggcggcgggcgagcagatagggaatcgtcagtccggcgaaataatagagcgaccacatggagacgacggcgcggcgatccgtgccctttgtcacctcggtgtatcggtcgatcgcccgctcgaagccgccatcctcgaagaatgcagacagagcaaccccaccgaccagctcatccgccagcatcatcttgtcgcggcaccatgcgtggtcgccggaaaaagcgggagacaagccgatcggctgcggaagccctggcgccgtccgcgcgatctgttgaactgtcatgactgaggttcggccttgcccgtatgcgtcttaatcctgactatgataatcaccaaatgcccgccgggaaagcgttttatgagtgaggctgtccactttttcgtgtgtcgaagacattcgcggcgagcccgcggaaatcgggtggcaccggcgcgcgccgggcgctatgcctgacatcactgaagaggatcgcaaaagggagagacgctatgccgcacaagcagatgggccttgccgaatgggggctgttgctggtgctctcgcttctgtggggcggttccttcctcttcaatggcatcctggtgaaaaccctgccgccgttgacgatcgttaccggccgcgtcctgatcgccgccgtcgcgctgaacctgatcgtgcgcgccaccggccacgccatgccgcgcgacggcaaatcctgggcggcctttttcgtcatgggcctgatcaacaacatgatccccttctgcctcatcgtctgggggcagacccacatcgcgagtggcctcgcctcgatcctcaacgcaaccacgccgctcttcggcgtcgtcgtcgcgcatctgttgacgtcggacgagaagatgaccggaaaccgcctgctcggcgtcctcgtcggcttcgccggcgtcgcctacatgatcggcttcgatgcgctgcgcgatcttggaaccaatgtgctggcgcagctcgcggttctgggcgccgcactttcctattccttcgccggcatctatggccgccgcttccggcggatgggcatggcgccgctcctgcccgccgccggccaggtcaccgcctccagcgtgctgatgctccccatcgccctcgtcgtcgaccaaccctggacgttcgccgcgccctcggccgaggcctggatggcgctcctcggcctggcgctgctctcgacggcggtcgcctacgtcctgttcttccgcatcctcgccacggccggtgccaccaacctcatgctcgtcaccttcctcatccccgtcagcgccatcctgctcggcgccgccatcctcggcgagcagctgcaggccaagcatctgatcggcatgacgatgatcgcgatcggactggctgcgatcgatggaagggtgttttcgcgggtgcggaggagggtggtgtgagcgccacttgctcccccctctcccctcggggagaggtagggtgagggggctattggttgtgacgtcagaggtttatgtttcaaaacaagaggatagcgaagagcccggagccccctcatccgacccttcgggccaccttctccccacgggggagaaggggaggtcggagcgagtggcttgccacgaatctcttctccccataggggagaaggtgccggcaggtcaggtgcaacttgttgcaccggggatgagggggcttcacggcacaacgcaagcgcccctgaccccactctcactcaacaagccagatcagccaccaccgaatccagaatcagcatccccgacggcgtgcagcggatgcgcgaattgccgatccgttcgataaacccgtgttccagtaaaaactcttcgcgcttcgggtccgggtcgcgccccgagagctgctgccagcgggcgagatcgacgccttcagtcaatcgcagtcccatcagcagcagttcgtcggcctgttcgtcatagccgagctgctcctggtcgagcatgccgtggccgtcgcgctccacgagctccagccaggcttccggcttgcgctcggtggcggtggcgagcttgaccggcccgcgcgtcagccggccatgggcgccggggccgatgccggcatagtcgccgtagcgccagtaggtgaggttgtggcggctctcggcacccgggcgggcgtggttggagacctcgtaggcgggcatcccctcggcggcggtgatgtcctgcgtcgcctcgtagagcagcgccgactggtcgtcgtcgggcacgacgagctttcccatcttgtgcagcccgaagaagggcgtgccctcctcgatcgtcagctggtagagcgacaggtggtcgacggcataggagatcgcctgcttgagttcgcgctcccattcctcgactgtctgtttcggccgtgcatagatcaggtcgaaggacatgcgcggaaagatgtcgcgcgccagcttgatcgccttcagcgcatcctcgacatcgtgcagccgcccgagaaatttcaggtcgcgatcgttcagcgcctgcacgccgagcgacacgcggttgacgccggcggcgcggtagccccggaagcgctcggcctcgacgctggaggggtttgcctccatggtgatctcgatgccatcgggcatgttccattccctggcgataccgtcgagaatggccgcgaccgtcgaggggttcatcagcgagggcgtgccgccgcccaaaaagatgctggtgaccgtcttcgggccgctcagctgccgcatcgtcgccatctccttcaggaaggcggcggtaaagcgctcctgatcgacaggctggtgacgcacatggctgttgaagtcgcaataggggcacttggtggcacagaacggccaatgcacgtagacgccgaagccgggctcgccggtatcgggcaaaagagatgcatggcgcgtcaggttgggctgttccaaagtgtccacgatcgctcttaggcgttaaggcaggtttcgacgaagatcttgaaggcgcgggcgcggtgggacaatgccgcggggtcgccgggcttccatccgtgcttctcctcggcgctcatctcgccgaaggtggtgtcgtagccctcgggctggaagatgggatcgtagccgaagccggcggtaccgcgcggcggccaggccacgaagccctcgacctctccgcggaagaactcggtatgcccatccggccatgccaggcaaagaacgctgacgaagcgcgcgctgcgctgctccggcgtggtggcacccttttcctcgagagccgtctcgaccttctgcatcgccatcgcgaaatcgcgcgtaccgtcggccgtttccgcccagttggcggtatagacacccggcgcgccaccgagcgcgtcgatgacaaggccgctgtcgtcggaaagggcgggcaggccggatgccttggccgaagccagcgccttgatcgcggcgttttcctcgaaggtcgtgccggtttcatccggctcgtcgaatttcagttcggctgccgatttcgccgagaagccgaagggaccgatcaggtcggcgatctcgcggatcttgccggcattgtggctggcaacgacgatggtgcgggtatcgagcttgcgcatggcggtccttcaaagattccaaagtttgggttcggcgcattccaggctgttgccgtcaggatcgcggaaatagatcgatcgcgccccgttcggccagctaaaatcgctttcgatggaaacgcccgctttgttgagcttttccgcgatcaagtcaatcgcttccgcacgcatccggaaacaggcatgccccgcgcccgtcgtgccgtgcggcggaaccggcagtgcgtccgatgaaggcggcttgatcgtttcgcggcggttgaagatcaacaggatgcccggtccgcagcgaaagaagacgtgccggttgtcatggcgcagaactttctcaagcccgagaacaccgccataaaaaccctcggcggcatcgaggtcgtcgacataaagcgcggtttcaagaatgccgtcgatcatgctgtcattctccggggcgccaaaagaccctctctggcctgccggccatctcccccacaaggggggagaaccgctgggcgcgcccgcctgcctccatcgaggttcggcggtgccgccgggttaagccctcccccttgtggggagggttggggaggggccttgcttgctacagcctctcagctgccctagccttcacacctcaaaccctcaggcaatcgccgccttctgcagttccaccagctcggcgatgccgttcttggcaagcgccatcagcgcgccgaactcttcctcgctgaacggcgtaccctcggccgtgccctggatctcgacgatcccgccggcgcccgtcatcacgaagttggcgtcggtctcggccgacgagtcctcgaggtaatcgagatcgatgacaggctggctggcgaagacgccgcaggagatcgcggcgacgtggtccttcaggacccgctcgaccttgatcatgttgcggctttccatccacttcaggcaatcgtagagcgctatccacgcaccggtgatcgatgccgtgcgcgttccgccatcggcctggatcacgtcgcagtcgagcgtgatctggcgttcgccgagttccttgagatcgaccacggcgcgcagcgagcggccgatcaggcgctggatttcctgggtgcggccaccctgcttgccggcggcggcttcgcgcttcatgcggtcgccggtggcgcgcggcagcatgccgtattcggcggtgacccagcccttgccggtgttgcgcagccacggcggcgtcttttcttcaaggctcgcggtgcagagcacgtgcgtgtcgccgaatttcacaagacaggagccttcggcgtgcttggaaaagttgcgctcgaaggtgaccttgcgcatctggtcggtttttctgccggaaggccgcatcctattctcctcggtgcacggggccggaacgcgggggcgatcccaggcttcatcatcggtgcaggtctgttgttgaccgcttctacgattggcggcgcgcatttgcaaattcccttttgcgcgcgcgggtagattggctatattttgcgacatcattgtcagcatgggtgcgcaaggcttaatggaattcaggtcgtcgacgatttcggacgccgttgccgcgctggacgaacgctccaaggaaatctttcgtcgcatcgtcgagggttatctggagacgggcgagccgctgggctcgcgcaatctttcacgcatcctgcccatgtcgctgtcgccggcctccgtgcgcaatgtcatgagcgatctggaagagcttggcctcgtctattccccgcatgtcagcgccggccgtctgcccacccaggtcggcctgcgcttcttcgtcgatgccttcatgcaggtcggcgacctctccgccgaggaccgcgccaatatcgaccggcaggtgcgggcggatagccgcgacggcccgatggaagcgatgatgaacgaggcaagccgcatgctgtcgggcatgtcgcgcggcgccggtctcgtcatcacatcgaagagcgatcccgtcctcaagcatgtcgagttcatccgcctggagccgaccaaggcgctggccgttctcgtcggcgatcacgaccaggtcgaaaaccgcatcatcgaactgcccgccggcgtcacctcctcgcagctcaccgaagccgcgaatttcctcaacgcccatatgacgggccagacgctgcccgaactgcgcagccagctcggccacctcaaggacgacgtgcgccacgagctcgacgcgctgtctcgggatctggtggagcgcggcatcgccgtctggtccggcaccgccgacgagggcaagcccgcgcagctcatcatccgcggccgcgccaatctcttggaggggctgggcaatcccgatgatctcgatcgcctgcgcatgctgttcgacgatctcgagaagaaggacagtctgctggagctgctgaatctggccgaaagcggcccgggcgtgcgcatcttcatcggctcggaaaacaagcttttctcgctctccggctcctcgctgatcgtggcgccctatcgcgacgaagacgaccgcatcgtcggcgccgtcggcgtcatcggcccgacgcggctcaactattcgcgcatcgtaccgatggtcgattacaccgcacagctgatggcaaggctctcgcgcccgtccaaatagcgctattccggcagctgcacgccggaaccgcccatttccgaaggcatgtccttgaacttcggcaacccgtccttcacgtgcaggatcgtgtcctcgtagtttacatgcatggtcggctggtaatcgagaccggggatcacaggcgcatagacgtcggtcacgccccagagcggatgctcgctgtagagatggccgccgcaggtgtcgcagaacttgcgcacgctgtagtcggtcttctggaagctctcgacatgctcgccacccttggtcacccgaaccgcctgcggctgccacagcgtgaaggtgttgatcggcccggccgaccagtgctggcaggagcgacaatggcaatagcccatcgcgacaggcgtgccggtcacggtcagttccacggcaccgcaaaagcatttcccgacatagacgttttcgtcggccatctcagcacctcccaggttgagagatgagtgtggcaccgtattaggttttgcgaaagtaagaatgacatgtggctgccgcctcttggtcgctttcatatgcggtcgtcacgggccgaacatgcctgtgtttccgaccttcttcgtcacgcagacttgatttttgatgttcaaagttcgatatcgggcacatccaaaagccaccaatgaccggagaacgtcatgactgacgagacgacgaagaacggacctgacgcagccgcggaagaagccgcagccgacgccgccgcaaacgtcgagaacgagaccgcagccgagcccgatccgatcgagctcctgaaggctgagaatgccgagctgcgcgaccgctatctgcgcctcgccgccgacatggacaatctgcgtcgccgcaccgagcgcgaagtcaaggatgccaagtcctattccgcggccggcttcgcccgcgacatgctggctgtctccgacaacctgcgccgcgcgctcgacgccatcccggaagaggcccgcgccggcgccgatgccggcctgacgacgctgatcgaaggtgtcgagatgaccgagcgctcgatgctcacgacgctggaacgccatggcgtgcgcaagctggagccggtcggccagaagttcgacccgaactttcaccaggcgatgttcgaagtgccgaaccccgacgtgccgaacaacaccgtcgtccaggtcgtccaggccggctattccatcggcgaacgcgtcctgcgccccgccatggtcggcgtcgccaagggcggcccgaagatcgtcgaagccgaaaccaactcggtcttcgaccagaaggacgcctgatccgatcgggcccgcctaagcgggcctgatctcattcaagacagtcagatgcgggcgaagcgttcgatcaggagatcgaagaagccgtccgcgtcgacatcgcgcatcacggtcacgttgcgcttgcggtcggtcacgtgccaccagtcgaccacggtcatgccgacggtcagctccgacttaacctcgatctcgacgttgcagatccgtcccttgaacagttcgggcttgagcagataggcaacgaccgtcgggtcgtgcagcgggccgccgtccgagccgtatttctcgatatcgaaacgctcgaagaactccagcatttccaccatcgcgatcgccggccgcgtgccgatctcggccatgcgcttgacgcgcgatttcagcgtcaagagcttgtgcgtcacgtcgagcggcatcatcacgacaggcacgccggagcggagcacgatgtcggctgcctcggggtcgacatagatgttgaattcggccgccggcgtgatgttgccgccctcggagaagccgccgcccatcatgacgagctcgcgcacgcggccgatgatatcgggcgccttctggaaggcgaggccgatattcgtcagcggcccgagcgtgcagagcgtcacggtgccttccggctcgctgcgcagcgtctcgatgatgaagtcgacggcgtgtcctgtctgcagcggcatggtcggctcgtcgagctcgggaccgtcgaggccggtcttgccatgcacatgctcggcggtgacgagcggccgggcgatcggcctgtcggcgccggcgaaaaccttggtgtcggtcttgccgcagagctcgcagatgatgcgcgcattgcggctggtgtaggagagcggcacattgccggcgacggtggtgatcccaagcagttccagttcctcgggactgccgaaggccagcatgatcgcggccgcatcgtcctgaccggggtcggtgtcgataatgatctttctcgggtttgccattccgtacgtcccatcctcccggtgcctgtatcgacgcacatatcgatgcatgcacaatctgtttatcttcccgccgcaaatcggcacagccggcgcggggcaggatttgatgcgaggccggacgggctttgtcaaggcggcgcgaccgcgtgcggacggcgcataggtcttgcgccgccgtgttgcgtcctgtcttgcgccgctgtcttgcgaatgacgccatcccttcccatattagcaacatccggatgctgtcttcaggtccggaagggtcgcttgcatcaaggacttggaacgctgatgagccgtatgacgcctttcgccagcccgctgctgctgggtttcgacgccatggaaaagacgctggagcggatttccaaggcgagtgacggatatcccccttataatatcgagcgcctcgccgccgaccgcatcaccgatgatccggagcgcctgcgcatcacgctcgcggtcgccggcttcagcgaggaagaactcgatatttccgtcgaggaaaaccagctggtcatccgcggccgccaggtcgagcagggcgagcgcgaatatctctatcgcggcatagccgcgagacagttccagcgcaccttcgtgctcgccgatggcatgcaggttctcggcgccggactgaagaacggcctgctgtcggtggatctcattcgcccggagccgtcgcgtatggtgaagaaaattaacatttcggtcccacagtaggacaacggcgcaaatcgcaccgttggtcccttctctctggaggtacaggaatgttgatgaaagaagccaattcgcacctgaccaagaccgagcttgccggcatcggcaacggcgaggtcgcctatatcaggaaaatccgctccgaggatgttccccggtgtttcccggaggctcccgatatcgatcccaatgtcgatctctgggcgctcttcggcgcggacggaacgccgatcctcctcacggacaaccgctccagcaccttcttcaaggccgctgaagacgagttgaagacggtcagcctgcactaaggcgggtcagcatgaaaacagacggcgttccccggagcgccgttgttttgtttctgaggggccgcatcggcccgtatttccctacaaagatcgtttagacgcgcttgaacgtcagataggccgaggatcgtccttcgcgccgggccttggcctcgtagcgcgtgctcggccagccctcgtagggcgtcagccagtccgccgcgttggtggcctgccagtcgaagccgccgtggtcgcggcacttcagaagcgtccagttcacataggtgtcgatgtcggaggcgaagcagaacaggccgccgggcttcagcacgcggtgaaagcggtcgagattggtcttcgatacgaagcgacgcttccagtgcttgcgcttcggccaggggtccgggtagagcaggtcgatctggtcgatcgatccgtccggcagccagtcgatcagctgcgtcgcgtcgtcgttgtagacgcggacattgcgggcgccggcatcgtcgacgctggcaagcagcttctgcatcgaattgacgaagggctcgacgccgatgaagccggtcgagggcgtttccacggcgcggtggatcagatgctcgccgccgccgaagccgatctccagcctcagccggttggtctcgacgggaaagagcgtgctcagcggctccggaggagccgccgagaggtcgatgatgaacgccggcaagagggtgctgagcttctccgcctgctgtccgcgaagttgcttacccttgcggcgaccgaagaaagcctcggtcgcgcgtccgcgacgttccatgtcagtcattgtcttaggccttgatcgcttccttgagcggcttcaccaggtcggtcttttcccaggagaacgagccgtcacggccagccttgcggccgaaatggccatatgcggaggtcttggcgtagatcggcttgttgaggtccaggtggcggcggatgcccgtcggcgacaggtccatggtcttgcggatcgccgcttcgacctgatcttcgctcaccttgttgccggtgccgtgcaggtcgacatagatcgacagcggctgggcgacgccgatggcgtaggagatctggatcgtgcacttttcggcgagaccggcggccacgacgttcttggcgaggtagcgggcggcgtaggccgccgaacggtcgaccttggtcgtgtccttgccggagaaggcgccgccgccgtgcggcgcggcaccgccgtaggtgtcgacgatgatcttgcggccggtcaggccggcgtcgccgtcagggccgccgatgacgaacttgccggtcgggttgatgtaccacttgcaatcgctggcgatcggcaggtcgccgagggcttcgcggatatagggttccacgacggcgcggaccttcttcgaatcccagctgtcgtcgaggtgctgcgtggagagaacgatcgaggtgacctcggccggcttgccgtcgacgtagcgaacggtgacctggctcttggcgtcggggccgagcttggcggcgtcgccgtcgccgctcttgcgggcggtggcgagcagctgcaggatcttgtgcgagtagtagatcggcgccggcatcaggtccggcgtttccttgcaggcgtaaccgaacatgatgccctggtcgccggcaccttcgtcgccctgctggtcggcggcgttgtcgacgccctgtgcgatgtcggcggactgcgagtgcaggagaacgtcgatcttggccgtcttccagtggaagccgtcctgctcgtagccgatgtccttgatggcgcggcgcgcggcggtcttgaacttcgacgggttgatgacgtcggcgccgttcttgtccttcttcatcaggctcggcggcaggcgaacctcaccggcgatgaccacgcggttagtggttgccagcgtttcgcaggcgatacgcacgccccatggattgacgccggtcttcgcggcttcgcggtacaccagatccacgatctcgtcggagatacggtcgcagaccttgtccgggtgaccttcggctacggattcgctggtgaagaggtaattggcacgcattccgggattcccctcaaagaataaaaagctgcgtagtggtactcagttcagggccgaaaaacaagcgcagaaggacataaatatatctttatatctgtgacaaaatggcaaattatgcccaaaaaacgcaaaaaagcggcctttacagccgctttcccgagtgtgacttctgagggatgcttattcggagtcggcttcggcggcgagcgccttgaccagttcgacgactttgcggcgcaccttgggatcggtgatcttcacgaaagcgcggttcagctgcaggccttccgacgaggacaggaagtcgaccacgtagttggagctggaggcttccgccatgccgcccgccatgccggcgttttcgccgggcgcgtcctcgaagaagaaggagaccggaacgttgaggatgctggagatgttctgcagccggctggcgccgacacgattggtgcctttttcgtatttctggatctgctggaatgtaatgccgaggctctccccaagcttttcctggctcattccaagcatcgttcggcgaaggcgaatacggctgccgacgtgaatgtcgatcgggttcggcttcttcttattctcaatcatggtgctgccctaacaataatctgcccttgtttaaaccggcacgcccaaacccatccccaaaacgccacgttgcaaagcgcgatctattcaccttgaaccatacgttaagaatgccgatcctaaccactatgcaattttaggggtttttggtcaattacgcttgaaaacaaaaccaaaacgcgagacgagtgcaattgcaagcagaagtgtttcgatcaaccagaagtacctttcgcgtgacgacggcagatcggccgaagagacgaaactatcaagggttgcgtcaaaaaagccggtttcgttcagtccaagccccgcaataatttcgccgcgaggacttatcatggcggaaatgccgctattggcatcgcgaatcagcggcaggccggtttccacggcgcgcacgcgcgcctgcaggaagtgctggtaggggccgggcgtggagccgaaccaggcatcgttcgtgatgttgagaatggccgatgccgaggcgatatcgccggtcatttcgccggggaagatgatctcgtagcagatcagcgggtagagcttgagcccgctcggcagtgtcagaagctgccgcgaggcggccggagaaaatccgccgggcatctcgacgacattctggatgccgaacgagctgagaaggctctcgaacggcatgtactcgccgaacggcacgaggtgcatcttgtccgcggcggcgatgatctggccacgaccatcgatcacgtagatcgagttgtagtagcgcggcgggttgccggggcccatatcctcggccctgacggcgccggcaagcagtacctggttgtcgtcgagcgtatcggcgatccgggtcagcgcgtccttgttgtcggtcaggatgaacgggatggcggtctccggccagacgatgatgtcgggctttttgccaccatccttcggcgcctccgccgaaagcttcaggtgcttctcgaagatcgccgcgcggtcgccattgctgtccatcttgtcgctctggtcgatcatcggctgcacgaacctgacgaccgggctcgggccggaacccggggcggcaactggcttcggcgcgccgtagagcacgtaggtgccgtatcccagatgcgccgccagcagcagcacggccaggccgatgcccgtcctggcgccctgcttggtgccgagcagggcgggggcggcgaagacgaagaccgacagagcggtgatgcccatgatcccgatgatgtgggccgactgcatcatgacaggcacgggcgtcatgccatagccgatggcgttccagggaaaaccggtcaggatcacgcttcgcgtccattccagcaggccgaagctcgccgccagcgccgcgatccggccaacgccgtccgaccagaaaacgcgcgccagcgccgttgcgacgccgtagaaaatcgccaggaatgccgggagcccgaggatcgccagcggcagtgcccaggcgaactcgtcggactcgatcatcagcgcctgcccgagccaccagagaccggcgacgaaatagccgaagccgaacagccagccggtgacgaatgaaggccatagccttccgatcaggctgctgccgggcgcggacgcggcgccgtctatcagccacaccaaaagggtgaaggaaacgaacatcgcggcgaagaagccgatgggcggaagggccagaacgccgaacgcaccggcaaggactgccagcatcacccttttatagccccagaccaggatgaccttgtccgcaatccgctccatgcgcacctcaaaaaatccgcgaatcaactgaggtcgcagtgtttcaataaagccgcaccttgtcgtggtgcgcgccgatcaatttgccgttggcgtctcgttctgccgttcgtcgccgtgatccaggcccgtcacgccgtcgccgtcgttcttcgcccgccggcggatcgcctggcgcttgcgggtgatgcgcacgcgcttgatgcggcgggggtcggcgtcgaggatgtggaactcgaagccgggcagcgcctgaacgacttcgccgcgcaccggaatgcggccaagctcggagaagatcagcccgcccagcgtatcgacttcgtcgacctgttcggtgatgtcgaaatccgggccgatggcttccgcgatatcctcgagctcgacgcgggcgtcggccacgaacatgtcctcggagacccgcttgaacatgacttcttcgtcgtcgtgctcgtcgtcgatatcgccgacgaccatctccacgatgtcctcatgcgaggctagcccgtcggtgccgccatactcgtcgatgacgagcgccatctgcgtgcggttcacctgcatgcggcgcagaagatcggaggcgagcatcgagggcggaacgaacaggatcttgcggatgatgcccgcttcggaaagcgtcttttgcaggtccacgcgggcgaggtcgaagttcggcttggccgagcgcggcgccttcaggttctcgggcgcgacttcgacgatcggatcggcgcccttggcggccttggtcggcgcgcggcgcttgttgcgcgcctgcttggcgacataggagaggaggtcgcggatgtgcaccatcccacgcggatcatccagcgtctcggcatagacgggcatgcgcgagcggccggattcctcgaacaggatcatcagctcgccgatggtgatcgtctggtccacggcctcgatatcggcgcgcggcaccatcacgtcggcaacgcgcacttcgcggaagcgcaggatgttgttgagcatcgccttctcgtcggcggagaaggcatcgccatcggccgcgtcggtcatcagcgcgtcggccaggtcctcgcggatgcgcgaaccctgctgtggtctcaatatgcgggcagcccgcgaccagaaggattgggatcgtccggactgcctgctactactgccaccctcgtcggaggatgattgatcggcggtgtccttggcctcggtggccggtctcgtcgtaaagtcgctcatggttccattttaaggtcttgaccctcgtatgggtcagataggccgagtttcgccagaatgcgagtctccagcccctccattatctcggcttcggtatcattattatgatcgtagccgaagagatgcaagaagccgtgcaccatcaggtgggtgagatggtcgtcgaagctcttctcgagctcgaccgcctcgcgggccacggtctccctggcgatgatgatatcgccaagcatcggccccggaaccttgcccggctgaaccgggaaggcggggaatgaaagcacgttggtcggcttgtccttgccgcgccattccgcgttgatgtcctggatcgacgcatcgtcggtgaagaccagcgacacctcggggaccattttcggaaacggctgcttctcggtctcgcgcagataggtcgcggccgtttccagcacgcggtcggccagcgcctggagcgcgtcctcggagggccattcgccctcctcgatgctgatctgtatgtcgagttcggccatcagtcctgctgcgcggcctctggtgtatccgtcaggtaggtcgcgtcgtaggcgcgaacgatgcggccgaccagcggatggcgcacgacgtccgtgtccttgaagcggatgatcgagatgccctcgacaccgttcaagagctgcagcgcctcgaccaggccggatttgacgccgcgcggcaagtcgatctggctcgggtcgccggtcacgatcatccgcgagttctcgccgagacgcgtcaggaacatcttcatctgcattgatgtcgtgttctgcgcctcgtcgaggatgacggcggcgttggacagcgtacgtccgcgcatgaaggcgagcggcgcgatctcgatgacgccggcggtgatggcgcgatcgaccttgtcggccggcatcatgtcgtagagcgcgtcgtagagcgggcgcagatagggatcgaccttctccttcatgtcgccgggcaggaagccgaggcgctcgccggcttcgacggccgggcgggagaggatgatcttctcgacgacgccgcgctccagaagctgcgcggcgtgggcgacggccagataggtcttgccggtaccggcggggccgcagccgaagacgagttcggaacgctccagcgcgcgcagataggcatcctgcgtcggcgtgcgggcaatgatggtcttcttgcgcgtggaaacctgcgccatcgtcagcttggccttcttctccatcgtcggcaggctcagctgatcgtcggcggccacagccatacggatcgcgccctcgacgtcggaacgttccacgctgccgcccttctggagcttgtcgtagagatagtccagcgtgcggcgcgcctggttggtggtgacgatgtcacccgagatcacgacggagttgcctcgcgcttgggcgtcgatgttcaggcgttcctcgagaagcttgaggttctggtcgaattgaccaaacagttcgctggcgaaccggttgttttcgaacgtcagaataaagtgattggcgtcgctcgcgatgcgtgggtggcgcggtgaagaagaaaccaattcttgtccgttcaagcggtcgagctccttgagttaggcaccagcctctacgatctcggaaaacaggctgttgggtccggtacctgtgattcgcacattgataatgtcaccgatttgcgatgcttttgcatcaacattcaccgactgaagccagggggaacggccgataagttgttgagacatgcgaccgggcttttcgagcaacagttcgatggtctttccgacgcaggattcggcaaattcctgctgctgcttcaggagaagcgcctgcaggcgttcgagcctttctgccttgatctcttccggcacctggtccttcagatcagcgccgggcgtgcccggccgcgtcgagtatttgaacgagaaggcctgcgcgtagcggaccttctcaacgagtttcagtgtatcctcaaaatcggcgtctgtctcccccggaaaaccgacgatgaagtcgcccgacagcgcgatatcgggacgcgccgcgcggatgcgctcgaccagcgtcagatactcggccgcggtgtgccggcggttcatggccttcaggatccggtcggagcccgcctgcaccggaagatgcaggtagggcatcagcgcgcggagatcgcgatgcgcctcgatcaggcggtcgtccatgtcgcgcggatggctggtggtgtagcgaaggcgggcaaggccggggatctcggccagccggtagagcaggtcgcccagcgtccactcctcgccatcagggccaagtccgtgccaggcattgacgttctggccgagcagcgtgatctcgcgcacgccgccctcgaccatcttctgcgcttcctcgacgatctgcgaaaccgggcgcgacacttccgagccgcgcgtatagggcacgacgcagaaggtgcagaacttgtcgcagccttcctgcacggtcagaaacgcggtcacgccgcgcgcccggatcttggtcttctcggcgatcggcagatgctcgaacttgtcttccagcgcatattccgtatcgacgatgcgctgcccttccttggcgcggcgcaacgcttccggcaggcggtgataggtctgcggcccgatgacgacgtcgacggcgggcgcccggcggagaatctcttcgccttccgcctgcgccacgcaaccggccacgccgatcatgaactcgcggccctctttattgcgctccctcttcatgtcgcgcagccgcccgagcgccgagtaaaccttctcggccgccttctcgcggatgtgacaggtgttgagcagcacgagatcggcctgctccatgtcctccgtcggctcgtagccgtcgcgcgccagagcatcgctcatgcgcgtggagtcatagacgttcatctggcagccataggtcttgatgaaaaccttgcggctgttgctgccatcgcggagtgttgtctccggggccgggaggagggcgctgtcctgggtcatggcggctatttagtggtttttgcgccgggagaaaagggaatcttgcctcaacccgcgtcccggcctctcaacgccgcgcccagcatggcgcggatgcgctgggcgatcgtcgagctgacctgcttgcgcttggtctcggcgccgtaggagaccgcttcgccgaaatggacgtcgacctcgaaggcgccgcagcgcagcatgtccttcaggtgcggcagcatctcgacgtcgccgggccaggaggcgagcgggcggtgatagcggcccatcggaagcccatgcacgccggtataggcgatcgccaccggctgcacgatgacggtcccggtcggcgaggcgggaatggccatggcggcggcgccgaacagcgaggatttcacctccagcagccggttgccatcggacgtcgtgccctcgggaaacaggacgacgatttcgccgtcggccatgcgcgcggcgatctcgttcacctggttgccggtgttgcgcttttcctcgcgcaccacgaagacgcttttctgcagcttggcgagcgttccgaagatcggccagtcgcgcacctcgttcttggcgatgaaggcgacgtcggcgatcgacgacagcaccatgatgtccatccacgacgaatggttggcgcagagcatcaacggcctgtgcgtctcaatccgcccgtgaacgcgcacccgaatgccgagagaaaagcagatgatgcgatgccagacgcgcggcagccggcggcgcatcttccagtcgtagcgcagggccagaagttgccagggcatgagcaggatgctggcgaggaggatgacgatgccggcgaaggcgacgcgcagccaggcgatcaaatcgaacactccgcggctgcacgcatgatatcagtgatcgtcctttttgagcggtatgccgtagagctcgagccggtggtccaccagcgtgaaaccgtgctcgcgggcgatccgctcctgcagcgcctcgatttccggcgagcggaactcgatgacgataccggtcttcaagtcgatcaggtggtcgtgatgctcttccggcaccgtctcgtagcgcgaacgcccgtcgcggaagtcgtggcgggcgatgatgccggcgtcctcgaacagcttgacggtgcggtaaacggtggagatggagatcttggcatcgaccttcaccgagcggcgatagagctcctcgacgtcgggatgatccgccgattcctcgaggatgcgcgcgatgacgcggcgctgctcggtcatgcgcatgccgcgctcggtgcaaagatcctcaagggttttgtcagcttccgtcatgaggtgccttccgatagtctgcgtttcaagacggaactagcgaagaatgcgcttcatgacaagcgccgtggatacctcgccattggcgtccttgtagtatccacgccgttctccgacctgatcgaagccgagcttgcggtagaggccgagtgcggcgacgttgcccttgtcgacctcgaggaagatgctttcgccgccgcgctgcttggcctcgcgcatcgccgcctgcatcagccgccacccgagacccgaccgcccgaccttggcctgcacggcgatcgtcaggatctcggcctcgccggcaacctcgcgcgccaggacgaagcccggcagcggctttttcaggaaggcgttggtctgccgcgccacgaagccgaagacgttgttctggctgagcaggctgtagaactcgccatcgccccaggggcgcgcgaagcgttcgccgtgcaatgtcgagaccgcatggcaatcatcggcatccatagggatgatttcgaattccggtttcagcgaaagataggattccagcatggtcatactcgcgcaatcgcaaacccggcctgcggcttggcgtcgggtccgcgcagataaagtggcttcggctttccggaagagggatcggcggcggcggcaaggcgcgccacgatggagatggggaaatggttggcgtgttcgccggtagcatcgggccgcagcaagggcgtcgccgagccggtgaccacgccgtcgaaggaggccgcgaaggcctgcgcgtcctcgacggtcaccgccctggcgtcatcgagcggcgtgccgtctgcgtcgaaggcttgcagatagatctcgttgcgcttggcatccatggcggccagcacccgtcggcccggcgagcgttcacgctctgcctcggccatgacagcgagcgtcgtgatgccgacggcgggcacgccaagcgaaagggcaaagccacgggcggcggcgacgccgacgcggataccggtgaaagaccccggaccgatggtgacggcaacgcgctcgacatcggcgagccgaacgcccgcctgatccagcgcgcggtcgataaccccaatcagatgctctgcgtgccccttgccgatcatgtccgatgcctcccccagcaccgtattcctgctgctgtcatagacagaagcagcgcaatccacccccgcggtgtcgagcgccagtatgatcatggcatctatttccgaataaaccgttcctgcccatctttacaccgctccatacatcgcaagacgccgcgcttgcaaacgccgcgtcgtcgcgaatgtcggttcagctcgtcagacggcttcgacttcctggacctcgggcacgaaatggcgcagcaggttctggacgccgtgcttcagcgttgccgtcgaggacgggcaacccgcgcacgagcccttcatgttgagatagacggtgccgtccttgaagccgcggaaggtgatgtcgccgccatcctgggcaacggccggacgcacgcgcgtatccagcagttccttgatcgtcagcacgatcgtctcgtcaccctcgtcgaagaactcgccatcggcatcggctgcttcaccgagtaccgaggaggcgcccatgaccggcttgccggacatgaagtgctccatgatcgagccgaggatggcgggcttcagatgctgccattcctggtcttccttggagacgctgatgaaatcgtagccgaaatagacgccggtcacgccgttgatctcgaacaggcgagccgcgagcggcgaggcggccgcttcctcgcggttgcggaactcggcggtgccgctctccatgacgatcttgcccggcaggaacttctgcgtggacgggttcggcgtggcttcggtctggataaacatggtgctctccgtgcggcaggcgcgcgcccgcgacgtatttagaattcttcaaaagtagaaataagccgtttggcgttgctattcaagagactgatactcaagaaagcgctttatgccaacgcgtccagttcctcatcgctcagtgtatcaggcaaaacagtgacggggatgggaaaggccgcaccccggccggcgaccgacgacacaaggggtccgggcccctccttggcggagctcgcggccagcaccagaatggcgatgtcgcggtcgtcctcgatgacggcgttgatctgctcggccgcgcttccctcgcggatgacgatctcgggctcgatgccgatattctctcgcaccagctgcgccgatttggccacgaccgcttcggcttcctcgcgtgcttcggcccgcatgatctcctcgacccccagccattgctggaagtcgccgtcggggatcacgtagacgagcaccaatccgccattggaattcttggcgcgccggccggcataatgaacggcgcgctggcattcgggcgtgtcatcgatcacggccatgaacttgcggcggtgaccttcgagccgtgagagtcgttttgataccatgagcgggactctgacacttgatccgggagatttgcaagtccccgtttttgccgcgaactgtccggtccccgacaggcatgcagccggacctatcgtccggcgggaaccagtccgtaaagcagcatgatttccttcacatgttcgatgtcaggcttgccgatgacattgatggccgaggcgatctcctcgaagaaccgcctgccgatcagccccggcgtcatggtgatcagcgcgcgtgctgtttcctggtgcaggttctcatgcgtgtggacgatgccgcgcggaatgaacaccgtgtcgccggcccgcacctcgcagcgctcgccgtcgacggtggtcgtcatcgttccggagagaccgaagatcacctcgtcgacatcttcgtggtaatgcgccgccggcacgcgagactggtaggggacgacgaattcgaacatgaccatgctgcccgcgctctggtcctcatcgaccagcagccgaacctccatcatgccgatctgaatgaggttccggtcgcgcatcttggcctcctcatggcttgaaggagagtacgccgcagtccggtcttcgacaagtgtgggccttcgaggcccaggaagcccgggcggccgaagccgcccggctcaacttgctagtagaggaagccgacgatgtcgcggacttccttcatcgtcacttcggcgcgcgcccgagctcgctcgccgccatcgcgcaggattgcgtcgatatggctggtatcggccatcaggcggcgcatctcggcggtgatcggcgacagcaccttgaccgagaggtcgatcagcgccggcttgaacaccgagaactgctgtccgccgaattccgcgagcacctcggccttcgacgtgtcggcgagtgccgcgtagatgccgacgaggttgtcggcctccgggcggccctgcaggccgtcgagttcgctcggcaagccgtccggatcggtcttggccttgcggatcttcttggagatcgcatcctcgtcgtccatcaggttgatgcgcgacaggtcggatgggtccgacttcgacatcttcttggtgccgtcgcgcagcgacatgacgcgcggcgccgggccgtcgatcagcggctcgaccatcgggaagtaggcatgcaccggctccttgccgacggtgatatccaccccgtatccggccttgcggatatgctcggcgtaatcgaggttgaacttcatcgcgatgtcgcgggcaagttccagatgctgcttctggtcgtcgccgacgggaacatgcgttccgcggtagacgagaatatcggcggccatcaggctcggataggcgtagagaccgagcgaggcctgctcgcggtccttgccggccttgtccttgaactgcgtcatgcggttcatccagccgatgcgcgccacgcagttgaagatccaggcgagttccgcatgctgcggcacggccgactggttgaagacgatatgcttcttcgggtcgataccggcggcgatgaaggcggcggcgatcgaacggatctggttcggcatgtcctcatgcaccagctgcgcggtcagcgcatgcatgtcgaccacgcaatagatgcagtcgttgccgtcctgcagcgccacgaacttgcggatcgcgccgagatagttgccgagatggagattgccggtcggctgaacgcccgaaaagaccagtttcttgaattcgttcatcatgtcctcgattaggcttgtggagggccccagggccaacggcccatgttgctaacgtcgcggcttatgcacgtcggatggcttgtgatcaaggggctgtggtggtggcgtgctggatgagatcgaaggtgttgccgtaaggatcggaaaacaccgcgacggtgccgtagacctcgtgccgcggcgcctccaggaagcgtatgccggccctggtcatcgcggcgtggtcgcgggcaaagtcgtcggtcgaaagaaagaacccgacacgcccgccggtctgatttccgaccacggccttctgccgctcgttggccgcttgcgccagcagaaacgcggccccgcttgcgcccctcggcttcaccaccacccaccgcttcccctccggctgcacctcgtcctgcaggcactcgaagctcagcgcatcgcagtagaacgccttggcgcgatcgtagtcgtcgatgacgagcgtaatgaggaagagcgattgggacatggatgggctcctgttgtggtcttgagtttgttgccggggactggcgggcggtcaagcgggaagggctggaatgaagacccctcccaaccctccccacaagggggagggcttaatctgtggcgctgccgaagccacgattgatttgggcggtcaccgcgagtcttctcccccacctgtggggggagatgcccggcagggcagaggggggtattccacggcaaaaacctctctcttcacatcccaatccaccaacacaccaaaaccccacgccgcccgaaggcccgtggtttcaaccatgcacttcactcggacggggcgctggaaatcacctcgattgagtaagtaagatatggcgcttcccagcgccccgttcggcggtttttatccgcgactccgatctctctgccttctcgcccaacttcgcggcgagaccatgtgtgcctcacaggcacgtccgggctcaactcggcaccctcttgcaagggataccgccgtcaccggagggagatcattttccgcggacccggatcatgaggttttgcgtcctaccctcacgctccgcgccgatcccgcctcgccggcacgcctgccggggtatccgatgacgggacgcgtttattgtagggcggggttttcgagtggggaaaattgacgccccgatttggtgtgaatatgctccggcgctctcgcgaaaagggcaattcataccccattttaggtatattgaatgtatcaattcgacgtaaaataaggcatgtacgtgatatactaggtaggatgttccttaaattggccatttttgaggagagttttgccgcccgcaaacatgagcgccgcgctgtgcggtgctcccaagtgggggacgaaatgatgcatcctgcattctcaatcgtactggccggccttttcagcctctcctgcatcgacggcgcgaacgctcagaacatgcgaaagctgtcgatcggaccgctgaagaaaaatgaaacgcttgcctatggcctgcagaccgtcagcgtccgcgccggctgctttccgccgaaactgagaggtatcctcgcctacattgccgacagggcagggcgccggccgctcgtcacctcgggcctgagggcgaattccggccgttcgcagcaccgtcactgcgccgccgccgatatccgggtatccggcgtttccgacaggacgatcatcgccattgccgcgcaggcgcccggcatcggcggcattggccgttattgcaacggcatcatccatgtcgatgtcggcccgaagcgccactggaccagatgttgagcggcggcgccggtcccggggtggcggatcagccgtccgtcttggtggccgccggcttgcgcttgaggttgcggcggatcatgccgaggttcgcgccgccgatcagaaacgccgtggcgaaatagaccaccatcgagatgccgatcagcaggccgagcgttccgaccttggtcgcgagcgaagcgctcgaggcgagccacggctcccagcgctgctgcagatacatgatcaccccgcccatgacggcggccgaaacgacgagcagcgccgttcgccgcgcgagcgcccattcccatttcaggtgaccgcgcctgatgagcgtggtgaacagaagaacggtgctgatccatccggccgtggcttccgcgaccgctatgcccggcgcgccgagatagggaaacagcgtcagcgccgtggcgcagttgacgccgacggcgaccgccgaaaagcgcatcggcgtcttggtgtcctcgcgggcgtagaagcccggctgcagcgccttgatcagcacgaaggccggcagcccgatgccgtagatcgcaaggatcgagccgacgatcatcgtgttttcctgttggaaggcgccgcgctcgtaaagcacgcggatgatctcgtcggacaagatccacagcgcgaaggcggcggggatcgtcagaaacatcacgaattcgatcgagcggttctgcaggttgcccgcctcgcgcagattgccgcccttcagcgcgcgcgcaagttccggcaggagcacgacgccgacggcgacgcccaccacgccgagcggcagctggtatatgcggtcggcatattgcagggccgcgatcgcaccttccttgctggaggcgatcgcctggccgatcatctggttgatctgcgtgatgccgccggtcacggcggcggggatggcgaggatcaaaagccgtttgacgttgggcgtgatcctcggaaagcggatgccgatgctcatgccggcatgcagtacgccgaaatagacgaccgcgagctgcaggacgcccgccagcagcacgccccaggagagataccaggcggtctgcagcggttcggcgccggtgtagagcgcgtaaaacagcgccccgatcatcacgacgttgaggaagaccggcgccacggcggcggcgaagaaatgatgcagcgaattcagcatcccgctcatcatcgccgtcagcgacatgcacatcagatagggaaacatcaccgccgccatgcgcacggtgatcgagaatttctccggatcgtcggtaaagcccggcgcgatgacgaagcgcaccagaagcggcatcgagagctccatcacgatggtgatgagaagcaatacggaaaacaggacgccgaacacttcctcggaaaaccgcttggcgccatcggtgccgttcgcctcgatctccttggcgaagagcggcacgaaggcggcgttgaacgcgccctcggcgaacagccggcgaaacaggttcggaaagcggaaggccgcgtagaacacgtcggccatcggcccggtgccgagcgccgccgccatcagcgtttcgcgggcgaagccgaacaaccggctgcccagcgtggcgccgccgacggtggcgaatttcttgacgaggctcatgcggctaaaattccttcatgggaagggtgagagtgcaattgcttggatgcgccgatcccatagaactccctcattcctgtgcccaagcttcgctcgggcgatgtcacaggaatccagctgccgcgcgtctgcgcggcgaaagactctttttcagcccaaggacttgggctggctggattcctgtgacgagcacaggaatgagggagagagggcttggcgaccacctatcgcgtcctctcggccgtgtcggccggcgcgatcatgcccgacggcatgcgctcgcgcagctcgtcctgttcctcggcgatgacagcccgcatgcgggcggtgatgttggagcgcttgctgtcgcccgatatcttctggccgacgagatcggtgacgtagaaggtgtcgatcaccttctccccgaaggtcgtgatccgcgccgactggatgtcgagcgacagatccgacagcacggcggtcacctcggacagaaggcccggccggtcgaggcactcgacctcgatgacggtgaacttgttcgacaggctgttggagatatgcaccgacggcgggatgacgaaggccttgctcttcttgcggttcttggtgcgggtcgcgatcacctcgggcagccgcttgcggccggacagcacgtcctcgatcatccgtccgacggtggccgcgcggcgcagctcgtcggcgtcgtccttgaactcgcggctgacatggatggtgtcgagcgcccggccgtccgaggtcgtgaagatctgcgcgtcgacgatgttggcgccggccgcggcgcaggcgccggcgatgacggcgagcaggcgcggatggtcgggcgacagcaccgtgatctcggtgatcgcatggaagctgtcggtgcgcaccatcgtcgccagcgcctgtccggccttgtcggcctggcggatgaagccggcatggcgcacctggtcttccagcggcaccgaaagtagatagggctggtagtgcagcttgctgtagatcttgcgatccttctgcgtccagtcggcaagcgcgttgaacagcgcctcggcggcgaccgccgcgcgctccttgcgcgaaacttccgagaagccgccggcaagcagaagctcggtctcgtagtagagcgtgcgcaggagctgccccttccagccgttccagaccccgggtccgacggcgcggatgtcgcagaccgtcaggatcatcagcatcttcagccgctccagcgattgcatgcggtcggcgaagtcggtgatcgtcttgcggtcggtgaggtcgcgcgtctgcgccaccatcgacatggtcaggtgttcctcgatcagccagacgacggtctccgtctgcttgtgcgacaggccgaagcgggcgcagagcttgcgggcgacacgggcgccggcgatcgagtgatcctcctggcgtcccttggcgacgtcgtgcaggagcaccgccacatagagcgcctcgcggtcctcgatcccgggcatcgtcttgttggcgagcggatgcagctcttcggccttgcccttgtcgatctccgagagcacgtcgacgctgcgcagcagatgctcatcgaccgtgtagtggtgatacatgttgaactgcatcatcgcgacgatcttgccgaattcgggaatgaagcggccaagcacgccggcctcgttcatgcgccgcaggatcagtgccgggtcgcgcttcgaggtcaggatggagagaaacagccggttggcttcctcgctctcgcgcacgctgttgtcgatcaggctgagcgagcgcgtcacgcgcttcagggcatccgggtggaattcgagcccgttgatatcggccacatggaacagccggatgatgttgacgggatcgcgcttgaacacgtccgcgccggcgagcgcgatgcggccgcgatcctccatgaagtcggtgctgccggcgatcttgcgggtgcggtgggtgaagcggctgaacacgcccgaaagcccgggcgtcgatttcgcctgctggtcctccagcgccgcgcagagaatgcgcgtcaggtcgccgacgtccttggccacaaggaagtagtgcttcatgaaccgctcgaccgccgaaaggccggggcgcgaatgatagtcgagcgcggttgcgatctcgcgctggatgtcgaaggagagccgttcctcggccttgttggtcaagaagtgcatgtggcagcgcaccgcccagaggaagtcgtcggccttctcgaacagatgatattcgtgcttggagagaacgccgagcgccaccagttcggcggtgtcgcgcacgtggtagtaatatttggaaatccagaacagcgtgtgcaggtcgcgcaacccgcccttgccctctttcacgttcggctcgacgagatagcgcgtgtcgcctgccttgcggtggcgctcgtcgcgttcggcgagcttggcggcgatgaattcggggccggtgccggtgacgatctccttgtcgaagcgggcctcgagctcggtttcgagcgaacgaaggccgcagatgtagcgcatctccaggatcgccgtgcggatcgtcatgtcggacttcgacagcgcgatgcactcttccagggtgcgggtggcgtggccgaccttgaagcccatgtcccacagcatgtagagcatgaattcgaccgccttgtgcgtctcttccgccggcttcggctggaacaggaagagcaggtcgatatccgagcccggcgccagcgtgtcgcggccgtagccgccgacggccgtcaccgagaacttgtccttctgcttgggaaagacgtggtcggtggcgaattcgtagaggaccgtgatgatccggtcctgcagccaggagatccgccgcgcgcatttcagtccgctgccgtcggccgagagcagttcgcgcgccttgttgcgcccgtccgcgctggccttcttgaagatgccaagcagatcggaacgcatcgcgtccggccggttcttgttggcttcgaccacggcgtcgcactgcttgcgcagatagtcggtatcgagaatgtcggagaaatcgatgtcgttcgtcggcgccatgcgctgggcggcttcctgttcgcgcggcgcggccatctgctgcgcctgtcgtttcgtctgcatgcgctatagcctttttgtccgctatttgacacgggctttcatactgcaagaacctttaattttggcgaaaaggtgatcgcgcgccgacgcggcgtacgaggcggtcgcgcttacgcggcgacctgcgcgttcaccgagtagagaaccttgcgcgtctcgctggcgatctcctccagcatgtcccggtcgcattcgcggtagccggccttggcgatcgatgccgtcagatcggagatgcgggcgcagcagcgggtgatctgcaacagcccgaaaggcgaggcccagccgcgcggagtgccgtcctcgtcggcgaggcgaagcgcctcgatcgccgtgaagatgtttgcgagcagctgcgtttcggcaagcaggcggtccatgaacatgcgcttacccttgcttcagcttcttcttgaggtcgtagagcgcgtccagcgcctcgcgcggcgtcatgtcgtcgaggctcatgttcttcagcgcttcgtcgaccttcgagggaccgcgcgccacatcctcgcgccgcaccgccacctggaacagcggcaggtcgtcgatcagctggctcgccgggttcttgcggtcggcgtcctcgagccgcgtcagcacatcacgggcacgcgaaacgacggaggccggcaggccggcaagccgtgccacctggataccgtaggagcggtcggcggcaccggggccgacctcgtgcaggaagatcacgtcgccgtcccattccttcacgcgcatcgtcgcgttggaaagccgcgccagcttctcagacagcacggtcagttcgtggaaatgcgtggcgaacaggccgcggcagcggtttgcctcatgcagatgctcgaccgacgcccaggcgatcgacaggccgtcgaaggtcgcggtgccgcgcccgatctcgtccaaaatgacgagcgagcggctggtcgcctggttgaggatcgctgcggtctccaccatctcgaccatgaaggtcgagcgcccgcgcgccaggtcgtcggaagcgccgacacgcgaaaacagccggtcgacgatgccgatatgcgccgacgtcgccggcacgaagcagcccatctgcgcgagaatggcgatcagcgcgttctggcgcaggaaggtcgatttaccgcccatgttcgggccggtcaaaagccagatcgcgccatccttgccgtctccctcgggagagaggtcgcaattgttggcgacgaacggcccggtggactggcggcgcagcgcctgctcgaccacgggatgccgcccgccctcgatggcgaacatggtcgaaccatcgacctgcggccggcaataggcctgctcgtcggccagcagcgcgaggcccgcggcaacgtcgataatggccagcgcccgcgcgccggccttgatcgtctccgcctcggagacgacagccgcgctcatgcggtcgaaagcggcaagctcgatcgacagcgcctggtcggcggcgttggcgatgcggctttcgagatcggcaagctcggtggtggtgaagcgcatcgcgttcgccatcgtctggcggtggatgaaccgcgccttggcctccggcgtgtcggtcatcggcccggcattgcccgccgtcacctcgatgaagtagccgagcacgttgttatgcttgatcttcagcgacttgatgccggtctcgtcggcatattgcagctgcaggccggcgatcacccggcgtgactggtcgcgcagcgcgcgcacctcgtccagctcggcattggccccgtcgcgaaggaagccgccgtcgcgcttcagaagcggcagctcgtcgccgagcgtttcgctgagcagtgccgccacctgttgcggcagggcgatgaggccggccagcgcgtcggccagttcctcgggcagcatcgcggtttcgagcagccgcgccacgtctgtggcggcgttcagcccctggcggatcgccgccagatcgcgcggaccgccgcgttcgagcgccagtcgcgacagcgcgcgcggcatgtcgggtacgtgcttcaggagatcgcgcaggtcgcccgagagcgagggctcctcgatcaggaagccgatcgaatccagccgttcgatgatccgcgccggatcggtcagcggcgacatcaggcgctcggcgagcaaccgcgcgccgccgccggtcacggtgcggtcgatggctttcaagagcgagccgttgcgatcgccggaaagcgtgcgtgcaagttcgagattggcacgcgtcgccgggtcgatgaacagcgtcgaggcagcgctttcgcgctccggcttgccgagcggcggccgttcggcgatctgcgtcttctcgacataggcgacggccgctgccgctgccgcgagttccgagcgcgaaaaggtgccgaagccatcgagcgtcgagacgccgaaatagcgcgcgatccgcccttccgccgtggcgctgtcgaacagcaccgatggctgcggcacggcggtgcggcccagaacgtcgaataccggcttcagctccggatcgtaaaacatcgtatccggcacgatcagctcgcgcggatcgatcctcgagatatcggccaacagccgcgatgcctcggtctccgccaggcggaaaacgccggtggaaatatcgatccaggcaagcgccatcagcggctcggaggcgccgcggatgcgggtcagcgccatgagataattcgattccgaaggcgaaagcagcttttcctcggtgatcgttcccggcgtcaccagccgcacgacgtcgcgcttgaccacggacttgctgccgcgcttcttggcttccgcggggtcctcgacctgctcgcagaccgccacccggaaaccgagcccgatcagcttctgcagatagtcgtcggccgcgtgaaccggcacgccgcacatcgggatatcctggcccatgtgctggccgcgcttggtcagcgtgatcccgagcgcgcgcgaggcgtcgagcgcgtcctcgaagaacagctcgtagaaatcgcccatgcggtagaacagcagcgaatccggattgttcgccttgatctcgatgaactgctccatcatcggcgtggccgaggcgcggctctcttccgttgcaagctcggcagccgaaaaggcttcgcgtctcaaggtcattcgatcgttcacggagtgggcttttctctaaaaaacagggtgccaccctatcgaagcgcggctatagaagacaacagctatcgggaaatgggagccgttagcccacaggaggattgagggaggtattcgacgagccgcaaggtcgggaaccccttgtgaggggagcctgtcagtttcaacggatattttaatcgattgtagccgtacggctttttcgcaacgcgtcgtgtcagccccgggaaccgtgtctatagaggggcgaccagcgcaatcgaaggccggttgtcaggagatttggaggagatatgcccgacatgaacagcaagcagcgccccgccaacggcattaccgacaaggaagcgctcgacttccattcgcagggaaaacccggcaagctcgaagtcaacccgaccaagccgatggccacgcagcgggatctctcgcttgcctattcgccgggcgtcgccgtccccgtcaaggccatcgccgccgatcccgctaccgcctatgactacacgtcgcgcggcaacatggttgcggtcatctccaacggtacggccatcctcggcctcggcaatctcggcgcgctggcctccaagccggtcatggagggcaagtcggtgctcttcaagcgcttcgccgatgtcgacagcatcgacctcgaggtcgataccgaaaatgtcgacgagttcatcaactgcgtccgctttctcggcccctccttcggcggcatcaacctcgaggacatcaaggcgccggactgcttcatcatcgagagccgcctgcgcgagctgatggacattccggtgttccacgacgaccagcacggcaccgcgatcatcgccgccgccggcctcatcaacgcgctggaactgaccggccgcgacctgaagacggcgaagctggtctgcaacggcgccggcgccgcggccatcgcctgcgtcgagctcatcaaggccatgggtttcgcgcccgagaacatcacgctttgcgacaccaagggcgtgatctaccagggccgcaccgaaggcatgaaccagtggaaatcggcgcatgcggtcaagacaaaggcccgcacgctggaagaagcgatgaagggcgccgatgtcgtcttcggcctgtcgcagaagggcgccttctccgaggagatgatcctgtcgatggccgaccgcccgatcatcttcgcgatggccaatcccgaccccgagatcacgccggaagaggttgcgcgcatccgcgacgacgccatcatggcgaccggccgctcggattatccgaaccaggtcaataacgtcctgggcttcccctacatcttccgtggcgcgctcgatgtccgcgccacgacgatcaacgacgatatgaagatcgccgccgtccgggcgctggcgagcctcgcccgcgaggacgttcccgacgatgtcgccgcggcctaccagggcaatcgcccgcgcttcggtccgcagtacatcatcccggtccccttcgatccgcgcctgatttcggcgatccccgtggcggtcgcacaggccgccatggaaagcggcgtcgcccgcaagccgatacccgacatggccgcctatgcgcgcgagctgtcggccaggcgcgatccgatcgcctcgacgctcgccagcctctatgagcgcgtgcgccgtcatcccaagcgcgtggtcttcgccgaggccgaggaggagcaggtcatgcgcgccgcgctctcctacgccaaccagcagctcggcaccgccatcctgctcggccgcgaggacctgatcaaggcgaccgccgagcgcgccggcatcgatctcaaccgccccggcctcgaaatcgtcaacgcccgcatctcgacgagggtggaggcctatatcgactatctctacgcccgcctgcagcgaaagggatacctgcaccgcgatgcccagcgcctgatccacaacgaccgcaaccacttcgcggcctgcatggtggcgctcggcgatgccgacggcatggtgaccgggatcacccgcaactattcgacggcgctcgaggatgttcgccgctgcatcgaccagaaacccggccatcgggtgatcggcgtgtcgatcgcgctctgccgcggccgcaccgtcttcgtcgccgacacggcggtccacgacatgccgtcggccgaggagcttgccgatatcgccgtcgaagcagccggcttcgcgcgccgcatgggctacaatccgcgcgtcgcgatgctcgcctactcgaccttcggccatccctccggcgagcgctccgagcgggtccgcgaagccgtcgccatcctcgatcgccgccatctggatttcgagtatgacggcgagatgtcggccgacgtggcgctgaaccgcaaggccatggagcagtatcccttctgccgcctgtcgggccccgccaacgtgctggtcatgccggccttccactccgcctcgatctccaccaagatgctgcaggaactcggcggctcgaccgtgatcggccccattctcgtcggcgtcgacaaggcggtgcagatcacctcgatgggggcgaaggacagcgacatcgtcaacatggccgcgatcgcggcctatacggggtcgtgagttgattgtggggtgaggtggctatggatgagggtgtgccgtgcggccccctcatctggctgccgccatcttctccccgctggggagaagggactcgtagcgggccgcttgctcaacctccccttcgccccaacggggagaaggtgcccgaagggcggatgagggggccacacggcacaacgctaaatgcagctaactacgccaaccaaatcagctggcaaaccgcccggcatcggcaccgtaataattcacataccgatccgagatgcttgatatcggcagaacgatcagcacatccgtcgtgttgaacgccttgtcgaccacggcggtggagccgaccatcgcgccgaggcgcaggtagcccttgatcagcggcggcagcgccatcagcgcccgcttcggattgacggcttcgaccggcatcaggtccatgtcgcgggcaagatgcggcagggcgtcgacggcccactcgtccttggcggcgacgttgtggcgcaggaacgagagcgccagcgcatgcatttccgggtgaatgccggggaaggaggcgcagccgaacatcgcgctcatgccgtgcttcagcgcataggcccagttgccctgccacaggagctcgacgatgcgcttggtgcggtagtccggcagcacgcaggagcggccgagctccatgaaacgcttatccggatggcgcgcgatgagcgagttgatgtcaaattcggaagccgagtaaaagccgccattggccatcgccacctcctgccgcagcaggcggtaggtgccgacgatctggtcctcgctgtcgccctcgatcgagcgatcgagcaccagcaggtggtcgcagaaggcgtcgtaggcatcgaagtcgcgcttgcggcgcatcgcttccgccggaagctgcgccttcatctcgtccacgaaaacccggtagcgaacggactgcgctgcgtcgatctcgccgggcgtgcgggcaaggcgcgtttcgagattgccgatccggccgaacacgtcgctctcgatctgttcggccttccgcgcggggggaagggcgtcgacgaggggctcacggttgcagatatccacggacatgacgaatctttcattgccggcttcaggacgccataaaacacttatatgcgacagcaaagtgacattttaaacccccaaatacgcaagaggcacatgggtgctttatcgctacagtgcttccgcgcggcgggcggaaagcgcggcgacggcctggacttccgtcaacagccgtatggggtctatgggtttcagcatgacgcggtttgccccgttcagcaagacttgacgacgcgattcgtcgcgtttgtcggcggtcaggacgatgatcggcaccgagggaatgtcgagccggcgctcatggccgcgtagccggccaatcatttcgatgccgtcgccgccgggcatggaaagatcgctgatgacgatatccggccgcacgcttccttccgccagcgccgcgtcgagcagcgcctcgaaatgttcgacatgctgcacgctgtggccggccttttcgagcatggcgcggatcagcatggcattgatcggatcgtcttcggccagcacgatcctcagcccgccctgaatgcccgcatccggaatgcctgcgctgaagccaggctggttgtcgttcagcgcgtcgcgcttttccatgccgcgcatgcgtccgcgcagcacgtcgatcagcgactgttcgcgcagcggccggatcagccaggcgtcgaagaggtcgagcgaatgggcgttgcgctcttccgggttgaccaggaagatcttgcgcaggccaagggctgcgatatccgtccggtcggccaggttcgcggcgaactccgccgacatgcggtggtcgacgatgatgtcggtcgggcgccgtccgttcgccgccatgtcgagcaggatccagcgcgccgtctcgccgtcctcgacgaagtggcactggcccccgagcgtgcggatggtctcggaaatcgccatgcgggcggcccccgccggcgccagcagaacgacgagattgcccgcgagcaaagcgtcgcggcgcggcgcgggctgttcgtccccttcggtgcggaagcggatgctaaattccgtgccggtgcccttttcgctggcgaccgtcagcgcgccgccgaattcgcgcatgatgcgcgccgagatggcaaggccaagaccggtgccgttgctcttttccaccatggtgcccgcctgttcgtattcgccgaagacacgcgcctgctcttcttccgtcatgcccggcccggtatcggtgaccgtgatcgaaagctcgccctcctgcagcgacacgcgaatgaacacgccgccgacctgggtgaatttcaccgcgttgccgatcacgttgaacagcacctggcgcaggcgcgcggcgtcgaagttcatcagttcgggaacgtccgacgaaacggtcgagccgatctcgatgcccttttcgtgggcgcggtgggcaagcatctcgacgacgctttcgagcagcttgcgcaccgattccgaccgcgggcgcagctggaagcggccgacctcgatggtcgagaaatcgagcaggtcctcgaccagctgggtcagcgcatggccggactgccggatgccggtcaggtaattgtcctgctcctgggtcatccgcgtttcggtcaggagatgcgtcatgccgagaatgcccgacagcggcgtgcgcagttcgtggctgacggtggcaagcagccgtgatttcgaggcgctgttgaactccgccttctgccgcgcctcctcgcgctcctgcgccgcgatgcgatcggcggtgacgtcgcgggcgatgctgtgcaaaagcagctttccgtcggcggggttgcgcgtcaccacatcgcgccagaagaagatgcgctgcccctccggcgtcgaaatctcgacgtcgtagcgatgcggttccgtgccgggccgaaaggcgatgcccatttcctcgcaggtctgtccgatcgggttcggtcgcccggtcagccgccggaacaggtcgttggcggcaacgatccggcgatcgatcgtccgggtcaccgtgatgtcgccgagcgcgtcgtggatgctggcgaagagcgcggtatcgctcccgccgcgcatggcgtcgtcgccggtgcgtgcccgggtgtgatggcggcgggtcgagaagacggcgaagccaacgatcgcggcaagcaccagcgcgccgatgccgatcgacatcagcagcgggccgccgacatgaccgagcgcgagcagcaggatggccgagacgatgccggcgccgccgagccagtaggagagcagtctgcgggccgaggtggcgatcacgggagcggcggcgacggggccttgctccggtgccgtatgggacatgtcagccgggatcgcggcctgctcatcttggcgatgagcggcaggcgcgccgaaggcgtcggcaagcttatcgtgtaactgacccagtccgaccataggttcaaattagcacgccggctgttccaaatgccttcagcaaaacgctaagattttatttatcgctggtcttgggttgcaatagctcgtccaaaatcacgcatcccgcgccggtcgtgatgaaaatatcggccaggttgaaaacagcgaaggaccatgtctcggtatagaacaggatgtagtcgaccacgtgtccataaaggaaacggtcgaggatgttgcccagcgcgccggcgatgatgaatgcgtagccgagatgggcgaaggtgcggtgcttgtcggtgcggcgccagagccagagcacgaaggcgacgatgatcagccgcatgccgacgatgaaccacccgtccatgcccgacagcatcgagaaggcgacgccgtaattataggtgcggtaaagcgccagcatcgggatgacctctaccgcctcctgaaacggaagcgtgcgatcgacggcgatcttgatgatctggtcgagcaacacggcggcgatgacgccgatcaggatcggcagcgggcgcgaaagcagcgtcgggcggtcttgtgtctgatcggtcatttggcctcggacagtgagagaaggtggcggcgcgcctcgaacatcatgacggcgctggcgaccgccagattgagtgaatcggccaggccctgctgcggaatgcgcgcgagagcatcggcctcgcgcgcaagctgctccggcaggccggattgttcgttgcccatcaggatgacgaccggcttggtcttgtagtcgatcgtgcggtagtcgacggaaccggccagatgcgtggcgaccagcgaaacgcccgcctgcttcttccaggcgatgaactcctccggcgtcgcccgcgagacgggcatggcgaagaccgagcccatcgtggcgcgcaccgtctcgagcgagaacgggtcggtggtctcgccgaccaggatgacgccggaagcgccggccgcgtcggcggtgcggatgatcgtgccgagattgccgggatcgcgaacgcggtcgagcgcgatccatgtctcgcccttggccgggcgaatgtcgcgcagcggcttccagcggttttcgaacacgccgaccaccatctgcggattgtcgcggcgggtgatcgaggagagaaccttttcgctgacctcgagcaccagcccgccggaggcaactgttttcgccgccatctgttcgaccagcggcttgcccttcgcggccttggcgtagacaagcgtgcggatcgtccagccaagctcgatcgcgtcgatgacgagcttcaggccctcggccatgaaggtgccgctctgctcgcgggtcttcttgtcgctgagcgccttgatgtccttgatgatcggattggcaagcgaggtgacttccttcacctggccgaccctgcggggaccgttgtcgcggtgttcgtggctcatttcggcacccagcgggaaaagagggacgtggagagcgcgcggcccggcgtgttgccgtcaagcccggcctcgcggatcaccagctctccggattccaccacgccgccggcgccgcgcatcgtctcgcgcatcagctcatggatggaatagaagctggcgcggatcgaataggccgtcagcacgaggccgacagccttgggcgacaggatctcgcggcagatgtcgagcatcacgggcaggtgttcgaacaggtgccagacttcgccattcggtccgcggccgaatttcggcgggtccgtcaggatgatgtcgtagctgtttccgcggcgctcctcgcgcaggatgaacttcatcgcgtcttcgcagatccagcggatcggtgccttttcaagcccgctcagcgcctggttctcgcgcgcccagccgatcgctttcttggaggcatcgacatgcgtgacctcggcgccggccgcggccgccaccagcgaggcgacgcccgtgtagccgaaaaggttcagcaccttcagcggccggccggcggcttcgacctgctgcttcatccacgtccagtgaacgatctgctcgggaaacacgccgacatggcgaaacgaggtgaagcggccgaggaaatcgacgccgagaaggttgagcggccaggtctcgcccagcgcttccttcggaaaacgccagcggccggtcccttcctcgtcggtgtcgccggtaaaggccgcgtcgaccttgtcccagacgtggctcggaagcgacggcttccacagcgcctgtgcttccggacgaatgatccggtaggggccgtattgttcgagcttctccccgttaccgctgtcgatcaggtgaaaatcgccggcgccgagggattcgagaatgacgggaacgcgctcgggcgggcgctcgccgctgcgctccatcaatgggcgctccggcgccgctggcgcggaggcgggctcgcgcgcggcctgttgcggtggcgcgggcctgttcgccggcttcggcgggcggctgttgccgcgctcgtcgccgcggcgtccactggcggggcccgtgccggatttctggcccggccggcgttctttttgtctcaacgtggtgttccgcgtgctgaatttgatagagcccgtgcaaatagcatcccattttcaccttggcaaagcgctttcccgccgcgatatgttcgatgacgtgaaaatgggaggattgtgatggacttcgtcggacaagagcgtatcaccgcgccgcgcgacgtcgtgtgggctggcctcaacgatcccgatatcctcaaggaatgcattcccggctgccagtcgctggcctttacgggtccgaacgagctcgtcgccacgatccgggtcaagatcggcatggtgccgctgacttttaccggcgaaatccgcgtctccaacatcgatgcgcccttgagctacacgcttacggcggaaggcaagggcagcatcgccggcttcgccagggggtcggccgatgtgacgctggaggacgacgggggagagaccgtcctgcattatcgcgccggcgccgatgtcggcggcaagatcgcccagctcggcgccaggctgatcgattcctcgtcgcagaagctcgcgcaacgcttcttttccgatttcaatgcggcggtcagcgccaaggccgcggaataaaaggccgttgccgaacaagaaaccaacgaggtaattggcagcccatgccgtctcggctacatccatagccatgcactggatcatccgatcgccagaaaaggcagacctggaagaactcgcggatatctatctcgcggtgcgtcgcgataccttcacctgggtcgatccgcaggctttccgccacgaggatttcgcggcgcacacgcagggcgaactgctgtggctcgccgaaatgccggatggcgagatatcgggcttcatgacgctatggtcgcccgacgacttcatccacatgctctatatcaggaaacagtatcgcggcctcggcgtcggccagtctcttctaagggcgctgccctattggcccgacaagacctaccggctgaaatgcctcgaccgcaacgagcgcgccaaggccttttatcgcgcccatggcttcgtggtgaccggcaagggagcatcgcgtgaaggcgaatacgaagagatgaccttctttcccgagcgctgagacatcactgcatctgcggcttgcgcaggaagctgttgcgatcggcggagtgcacgcgcagccacgcctcgcggccatccctcaggatgcgcatggggatctcggcgccagccgggccgctgctccagatcttgcggtagaagtcggccagcccgtcgacctcgccgtcgcggatttccgagatgacgtcaccacgtttgagcccggcctgatccgccgggctgccctcggcgacgctcatcacgatcacgtcgccgttgctttcggccgagaacgcgccgagccaggggcgtgccggcttgttgacctggccgcgcgtcgtcaggtcgtcgagaatgggtgtcagcaggttgatcgggacgatcatgttgatatcggccacatcgccgccctggctcatctgcaatcgcagcgaaccgatcccgatcagcttgccctcgccatcgacaagcgccgccccgccccaggaggggtgcgcgggcgtggtgaagatcgcttcgtcgagcaggtattcccagtagccggcgaattcctgcttggcgacgatcctggcatcgacgaactcgccggtcccgtcgatcagcatcacggcctgcccaagctctgccgctgtcgcgtccccgaattccagcgccggcaggttgagggggccgagcgcctgcaagaggccgaagccggtctcctggtcatagccgagcggatgggccgccacgacccgcccgtcatgggcggtgagccacacttcctcggcctcggtgatcagatagccgatcgtcagcaccagaccgctgtccttgatgaccacgccgttgccctcgcgccgcgtacccagcgtatcagccgtgaaggcatcctcgggtatggtgctgcggacggcgacgaccgatttcaggatctgatctgtgttcatggtttcatcctcatgaagcgacgcgctgaggcagtgaaactgcttttccaaagacggccgcaacgggttctattggacatagctatgaagacagatggcgcggtgcaaggccttggcaagccgaaatcaccgcgcgcattatgtcaggcgttgctgaaaaacctgaagtcttagcgcgacggcagctgtccggcgatgtcttcggagcgcgccttgtgacggtcggcttcgccctgccagcgaacggcttccttggcctcgttgcgcgcccgcttgcgatgcttgccctggttcacccaggtaaccgccgagcccgcgaacatgccgatgatgagcgcaatgaacaggaagacgaagaagggcgccgatagcgacagcacctggtcctctggccggaacggattgaacgccagcgtcacgctctgccggttggcgacgcaaaaaatgatcaggatgatgccgagcggcagcaaaatcaggaggttgataatcttcttcgccatcgcaggcctccacatgcttgcgcacgctcgtcaatagcggcgcgttcgttcagccacaggatagaaaagctgccgtgaagttcaagtgcggtttcgtcgcgggcgtgtgaggcgggcggcgatcaatcgtcctggtcggcctgtccggggttcagccgctcgcgcagctccttgccggtcttgaagaacggaacccacttctcctcgacgaacacggtatcgccggtacgcgggttgcggcccgagcgcgagggacggttctttaccgaaaaggcgccgaaaccgcgcagctcgacgcggttgcccgccgccagcgcatcggtgatctcgtcgagaaccgcgttcacgatattttccacatcgcgatggtaaagatgcgggttgcgagccgcaactatctgcaccagctcggacttgatcacggtggcccccttaaattattgatttcttatcaatcattgccaacctgccaaactgaaacgagcccgtcaagaagcaacttttgcggcagaattcccgtgaggtcctggcttctggcgagatcgccgtatccgagaagcgtcaggatctgcgaggccgcgcctgcgagcaggaacggcgtggtgctcttcttgttccaatcgatctcgggcaggtccttgctgacgttcttggtggccagatacgcccggatttcgtcgtcgccgccgagctggtcgacaagctttgccttgaacgcctggcgcccggtgaagatgctgccgtcggccagtttcagcacgtcttcgcgtggcagcttgcggcgatcggcgaccagatcgacgaaccaggcgtagctgtcgacgaccatgttgttgatcatcgccttggcgtcgtcgctcgccgcattgaagggcgagggttccgccttcagcggcgaggatttgatcgactccatcgagacgccgagcttgtcgagcagaggcttgacctgcggatactggaagatcaccccgatcgagccggtgatcgagctgtcgccggcgatgatcgtatcgccggcggtggcgatcatgtagccggccgatgccgcgagcgtgcggatgtcggaaaccacgggcttcttggccgcgatcgcgcggatcgccttgaagatccgctcgccgccataggtcgtcccgccgggcgaggaaatggaaaccacgagcgccttcaccgcatcgtcgtccttgatcttgtccagacgctcgagcagttccttgtcgtcggtgatcaggccggagatcgtcacccgcgccacatgcgggcgccggttggcgttgtcggcgaacaggaagccgtaaaaggcgagcgcgagcccgagcagcagcagcacggccaccacccgccagaaaccgaccttgcggcgtagtctgcggcgatccgcgatcatggaactgtccatctattcctccggtcggcaagtctcacacaactcttttgacgtagagtgcaatagatatgcggaaacgctgtgtcgattggttttgcggttttcttgcttgttgcagaaaaaaatccatattggcaagtcagtgtaataatgcgaaacgaactgtgatcgggcgaaagcgctccctatatacgccgtcctatcatcgacacggaccgaatgaatgctcaacaccttggataatggcgggcaggctgcctatgccaagcctgcgcaaagcgcctatggcgcggcgcggtttcactcccagcgcgtgcgccggctgaaggttctgctgcctgtcgccgccgtgatcgtctcgctcgccttcatcggcgtctcggtgatccgcacctatctgcccgagaacatcaagatcgagggcgccaagatcgagaacggcaaggtcgtgatgctgaaaccggcgatcgccggccgcaatgccgcaggcatcaactattcgatgctcgccgaacgggcgctgcaggacatcaagaatccgaacctgatctcgctcgaaaccgtcaaggcggtggttccggtcaaggacgatctggtcgcccgcgtcgaggcgacaaccgccgattatgaccgcgcgaccgacaacctcaacatcacctcgcccttcgtcatcaacatgagtgacggcctgaccgccaagttccagacggcgcaggtcgatgtcaaaggcggaaagctcatcaccagcgaccccgtcgacatcaaaaaagatggcgcttctgttgttgcgcgctcgctcaagatgacagataagggacggacgatcacgttcgaggggagcgttcgaatgaacgtgaatcccaccgttattcgcaaacagggcacttaacacccgggtcaccatggcaaaagattgtcgcatttctacccgcaaggcgggcgcagtattcacgaacggtgcgcttgcactcctgctgttggccggagccgcgatggcgcaggcgacaaccagccagatgagcgggctgcagctcaacaaggatcagccgatccagatcgaaagcgacaagctcgagatcaaggaccaggaacgcatcgccgatttcaccggcaacgtgaaggtcgtccaggggacgaccacgttgcaggccggtcaaatgcgggtgttctacaaggcgaaggatgccgccaccgatggtagcgcgccggccaccaaggccgccgaaagcgcgacaccggcatccggcctctcatcgagcagcgccgacatcgaccgcatcctcgtctcgaacaaggtgttcctcacctccggcacgcagaccgcgaccgccgacaacggttcgttcgacatggcaaagcagctcttcgtcctgaagggcgacaaggtcgttctgacggatggcggaaacgtcttcacaggatgccagctgacggtgcagatggcgacgggtcaggcacaactggaaagctgcgggggccgcgtccagattcagctcgatccgcaatcccagaaaaagaactgaccccggccagcacgtgaaattattctcgctatcgaatatgttcggcaagaccgggcaacaggccgccgcagatggcggtgccgttgacaagagccgctatcagggcaccctgatcgcgcgcggtctgacgaagacatacagcacccggcgcgtcgtcaacggcgtttcgctggtcgtgcgtcgtggcgaggccgtcggccttctcgggccgaacggtgccggcaagacgacctgtttctacatgatcaccggtctggtccccgtcgacgaaggcacgatcgagatcgacggcaacgacgtcacgtcgatgccgatgtatcgccgctcgcgcctcggcgtcggatatctgccgcaggaagcctcgatctttcgcgggctgacggtggaggaaaacatccgcgccgtcctcgaggtgcatgtgaaggacagggcgcagcgcgagaagaagctcgacgaacttctcgacgagttccacatccgcaagctgcgcaagagtgcagccgtatccctgtccggcggtgagcgccgccgcctggaaatcgcccgcgcgctggccaccgacccgacattcatgctgctcgacgagcctttcgccggtgtcgatccgatctcggtgtccgacatccagaacctcgtgcatcatctgacggcgcgcggcatcggtgtcttgattaccgaccacaatgtccgcgagacgctcggcctgatcgaccgtgcctatatcatccatgccggcgaagtgctgacgcatggtcgggcgaacgatattgtcaacaatgcggaagtccgcaggctttatctcggcgacaacttcagcctctgatcgtttgtcttttttgatcgcgagcccctttgttcatggggctctcacagcggaaattcaccttcccgcatagttccgcttgaccaaatagcataaaaaagcaatttttgggccaacttggatatcagtggtcccacatatcggacgtaatgaaaatcgcgatcgattttcgttacgtccgatatgtaaattcaacgagttagagcgtcctttgtgcgtcctacggacgcacggcgctctatccccgttataggacactgttttcccggaggaaccgagcgggagttttgcgtccatcatggcactttcggccaatttatacctgcgccaaagccaatcgctggtgatgacaccacagctgatgcagtccatccagctgcttcagatgacgcacttcgaactcacccagttcatcgctcaggaagtcgaaaagaatccactgctcgagtttccgtcaaatgacgccgaaacgggcagtgatcgcgccggcgacgaggacgatgcgcacgcccgccacgccgaagagcagggcttcgacgaagattacgacagccgctccgaagtcatgtcgggtgactggtccgatcgcgccgatggcgccggcgccgtcaggatgagcgacgaactcgacgccaactacgccaacgtctttcccgacgacggcgtgccgcagcggcccgacgcgcccgaactgatcagccagtggaaatcgatgccgggcggcggcgagggggcggatggctacgacctggacgatttcgtcgccggccaggtctcgctgcgcgaccatcttgcccagcagatgcctttcgttttgcccgatatggccgaccagctgatcggccggtatctcgccgaccagctggacgaggcaggctacctccatgccgatctgaatgaagcggccgaacggctcggcgccggcatggccgatgtcgagcgggttctggccgcgctgcagacgctcgatccgcccggcgtctttgcgcgtaacctgtcggaatgcctggcgatccagctgcgccagaaggatcgcctcgatccggccatgcaggctttcgtcggcaatctcgaattgctggcccgtcgcgatttcgcgacgctgaagcggctctgcggcgtcgacgaagaggacctgctcgacatgctgagcgagatccgccagctgaaccccaagccgggcagcggcttcgagacggcggtgtccgaagcgatcatgcccgacgtcgtcgtgcggccgagcgccgatggcagctggctggtggagctcaacccggatacgctgccgcgcgtcctcgtgaaccaggcctatttcgccaaggtcaccaagaatggcgatgaccacgcctttctgtcggaatgcctgcagacggccaactggctgacgcgcagcctcgatcagcgcgccaagacgatcatgaaggtggcgaccgaaatcgtccgccagcaggatgccttcctgctccacggcgtcgaccacctgcgcccgctcaacctgaagacggtggccgaggcgatcaagatgcatgaatcgaccgtcagccgcgtgacgtcgaacaagtacatgctgacgccgcgcggcctgttcgagctcaaatatttcttcacggtgtcgatcagcgcggtggaaggcggcgacagccattcggccgaggccgtgcgtcacaggatccgcgcgctgatcgcgcaggagagccccgacgccgtactctcagatgatgatatcgtagacatcctaaaggggagtggggtggagcttgctcgccggacggtggcgaagtatcgtgaagccatgaatatcgcttcctccgtccagcgccggcgggaaaagcgagcgctcgcgaaggtcgcgggcttctgagcagttcggtctgttccggccgacgcgtcccgcccccgcgagaaaacagggcccgtgttgactttttggtaacttctggctagaagccgcgccaaattgacgctgtgactggcgttagaggttatccccatcaatccaaagggcgcccacagccgagaacttcggccgatcttgcttgagattgcgcgaagtgcttggatgagagtcaggcttggcgtaaactggtactcgcaaaccacataagaagggaaactccatgagtgtgcgtgtatccggtaaacatatggaaattggtgactcgttccgtcagcggatagaggaccaaattgccgtggccgtcacgaaatacttcgacggagggtattctggtcaagtgatcgtacaaaaggccaacgcccgtttcgccgccgattgcaaggttcatctcgacagtggcgtgattttgcacgcggctggcgaggcaatggaccctcaattggcattcgacgccgcttccgagcgtatcgagaagcgacttcgccgttacaagcgcaagctcaaggatcaccatgccgggaatcatctgaatggttttgccgaagtcgcctacaccgtcatggatggcatgccggatcatgacgacgaggtcgccgatgatttcgcaccggcgatcgttgccgaaagcaccaagcagatgaagaccatgtccgtcgcgaccgccgtgatggcgctcgacatgacggacgagcccctgctgctcttccgcagcccgggtaacgaacagttgaacatcgtttaccgtcggcacgacggcaacattggctggatagacgcagccaacatcaaaagctgaggcaacggagcggagcggcgggcatctgccgctcccccggcttggcacaaaaggaaaaagaaatggctttggcagatttgctgcagcagaatgcgatcattcccgctctcagggtcaactccaagaaacagctcctgcaggaattgtcggccaaggcgtcgaaagtcaccgggctgtccgagcgcgagatctttgacgtcgtcctgcagcgcgagcggcttggttccaccggtgtcggcaatggtatcgccattccgcacggcaagctggcaagcgtcaattccatcgtcggcatcttcgcgcgtctcgaacagccggtcgatttcgaagcgctggacgatcagccggtcgatctcgtcttcctgcttctggcgccggaaggcgccggcgccgatcatctgaaggcgctctcgcgcatcgcccgcgtcctgcgcgaccacgatctcgtggccaagctgcgcgccaccgacagcgcctcggcgatctatgccttcctcaacgaagagcagacctccaacgcggcctgatcatctccagttcaaatgaaaagaggcgccggatcgctccggcgcctctctttgttttggctcagccgatcggctcagaactcttcccaattgtcctgcgcgacggccgccgatccgtgcgactgcgcgacagcgcggcgcggagcgggggcggctgcctggcggtagctcggctgcgacgacggacggtagcttggtgccggcgtcggcgcccgcatctgctgggccgtggagcgcagggatgacgcgtggttgccgttgccgacgcggaagcgggcgaccagctgctgcagcgtctgtgcctcctcgttcagcgtcacgctggccgcggtcgtctcctcgaccatggcggcgttctgctgcgtcacctggtccatctggttcatcgcctggctgacttccttgaggccgatcgcctgctcgctggccgatgccgagatttcccggatcagaccgttgatgcgcatcacctgctcggagatgttgtgcagcgtgtcgccggcgcggccgacgagatcgacgccttccttgacctggacggccgaggtgttgatcagcgtcttgatctccttggcggcgttcgccgaacgctgggccagttcgcgaacttcctgggcaacgacggcgaagcccttgccggcttcaccggcacgcgcggcctcgacgcccgcgttgagcgccagcaggttggtctggaacgcgatctcgtcgatgacgccgatgatgcgcgagacctcggtggaggactgctcgatgccgtgcatcgaggcgatcgccttgcgtacgacatcgccggagcgctccgcatcctcgcaggcatggttgacgttgtcggcggccgtgcgggcattgtcggcgctcgagttgacctgcgcggtcagctcgttcagagccgctgccgtctcttccaggcttgccgcctgctgctcggtgcgcttggcgagatccgaggcgctgccgctgatttcgctggtgccggagccgatgttgacgacgctgaggttcatcgtcgtgatggtctcttcaagcgcggccaaggcggcgttgaagtcctgcttcagcttgttgtactcgcccgggaattcgtcggtgatgcggtggccgagattgccctgcgatagctccgaaagaccggcgccgacgatcgagacgatctggcgctgcagcgaaaccgactgctggcgttcgctttccgaacggccacgctcgtcttccgcttcctggcgctgggtcctcgcttctgcttcgaggcggcggctgtcggccagcgcgtggcggaagccttcgagcgccttggcgaccgaacccgtctcgtccgagcgttcctgtccggtgaccggctggtcatagcggccctcgctcagcatcctgacgctggcaaccaggccgccgagcggcttctgcacgaaggtgcggacggcgaagtagagcgccagcatgacggcggccagaacgatgatgcctgccacgatcatcatgaaggtctggtcctgcaccggcccggcgaccgcgctgtgcggcacatcgacgaggatgacccagttcgtgttcacgtcgggcagcgcgaagggatagaccacgcggtcgaacagctcgccgccatcgaccgagagatccttgacgatcgagggcgtgagcgtggcaagaccgctcttcacggcatcggtaccctcaccctcgtagggcttcattgccagatccttggctggcgggacgatccagttgccgccctgcgagagcagggtcacgcggccggtgccgaacggcttcaatccgccgagcttgtcggacagggccttcagcgagatatcgacgccgctgacgccgatcatcttgccgccggacatgaccgggtaggcgatggaggtcatcgcggtgttctcgccggtggtgctttcagcgtaaggcgaggagatcgcgcctttcttgcttgcggcggcgaggctgtaccattcggccttgtagtccgatccgaagacggagaaggtgaagccgccatccttcttcttggtccagtaggcattgaaagcgcccgtcttgtccgagccgagatccgtgcggccggcgaaggacggcgactggccgtcgaatgcgttcggctcttcgccgaaccagctgccgaaggcgaactggttgcgctcgacattggccttcagcatatcgacgatcgccttgcggtcgagatacttgccttcctggccgcgaccgatgacgccggccatggaacgcgccgcgccggcgagttcgccgaccgaggaagcaacttcgttggcgattgcctttgcctcgagattggcctgatccatggtcagcgtgtccacgcgatcacgagtctggtcgatgaggaagaaattggagatcaggagaaccagcgcgatcgcgctgccggtgatcacaatgagtttggccgcaagcgatttcatgcgaaagatgaacatggattcctcgggggagatcaaggatgggccgggcaaggcatccgccggcacaagaagcaagggcgggcttcatcatggagccgccgtggcgagtgccgtatccccttggagaagggagccggcgatcacgcggaagatcgccggaaacctattaaatttgagtgaaatgcgatgaattttcgccccatcgcaggcaaacgcggcgccgatgtcgccggttgataatgcttatagtttgtttgcgacgtcatcccgcgaagggatggaaggctgggcacccggcttgaggcatgcgagcgagccggcaacggccgcgcggcgaagcgcgggctcgaaatcgagcccttcgtcgaggctggcggcgaagtatccgcagaaggtgtcgcccgcgccgacggtatccaccggctcgatcttcagccccttcgcgcgcgatatcgcgccgtctcggatcgccaccacgccatcgccgccaagcgtgacgatcagcgtctgtcccgtctcggcgttgaggcgcctcagtgcggcctcgcgatcctcggcactcatgttttcctgcccggccagaagctcgaactcggtttcgttggcaatgacgatatcggcgaggcgcccgagacgcccggcatccgcaatcagcggcgcgagattgaggatcgtcgtcacccccttggcgcgggcggcgacaagcgcgcgttcgaccgacgccggcggaatttcgaactgcagcatcagcacgtcgcctttgctcatcgcgccgacggcctgatccgcatcctgcggcgtgaccgtgccgttcgcgcccggcacgacggcgatcatgttttcgccatcgccgcccacgaggatgatcgcggttcccgtcggctggtccgcgcgcttgacggactggagatcggtgccggcctccttgaggagggcaagcgcttcgtccgaaaagccgtcatggccgaccgcgcccgccatgtgcacggtgcgtccggcgcgacgcgcggccagcgcctggttggctcccttgccgcccgccgccgttgaaaagccgttgccggccaccgtctcgcccggcttcggaagccgttgcgtcgtggcgatgaggtccatgttgatggagccgaaaacggtgatcatgctgcgggtgtcccttccaattctctgtcgggcgcgacactgccgaaggcgtcactcgtcgtcaaccaccctcagcttaagaagtcccgttctgctctcgacggatttcgacgcgggcgcttcctcgtccgccgcgcggcctgcctccgcgccttcgaattccagcgcctcgatcttggcgccgcgtctggtcagcttgtcggcggaggtgacgatcatgtcgacatccttctgcgccatggcgaaatgcccttgcagcttgcgaacgcgatcgtcgaggcggccgaggtcatccatcaggttggcgacctcgccctggatgacatgcgcctgcgcctgcatccgctgatccttcaacaccgcctggatgacctggatcgacaacatcagcagcgagggcgagacgatgaccacgcgggcgcgatgcgccttctgcacgatcgcctcgaaattctcgtgaatttccgcgaagatcgattccgacggcacgaacaggaacgcggtatcctgggtttcgccctggatcagatatttctccgcgatatcgcggatatggatttccatatcgcggcgaaactgctgcgacgcggccttggcgagttcaggtccgccggcttcgcgaatggcgttccatgcctcgagcgggaatttggcatcgatcacgagcggcggcgcgccattgggcatgcgaatggtgcaatccgggcgcgagccgttgccgagcgtctgctggaaggcataggcgccgatcggcaggccgtcggcgacgatcgtctccatgcgcgactggccgaaggcgccgcgcgtctgcttgttggacaggatcgcctgcagcccgacgacatccttggcaagcgtctggatgttgttctgcgccgcatcgataaccgccagccgctcctgcagcttcctcaggttctcatgcgtggacttggtctgctccgttatggtcgagctgacgcgctgcgacatgccgtccagccgctggctgatcgcctggttgagttccgactgcctggagccgaacacctccgccatcgcggccatccgcccctgcatttccgattggatccgcaacagctccctcatccgcgcatccgcttcggcggcgcgctccagcgcctcttccgcctgttcgcgccgcagctggccgccacgaacgagaaggatgatcatcagcacgatcagtgccgcaagggccgcgccggcaagggcgagcgacatggggctgaagcctgaaagggtggcggagagcgagtcggtgctggttgtcatgcgcgcaccatagcaaagtcgcacggcttttccagatcaaaacgtgaacatgattgatagacccgcctttgcgcgggagatgccacacgaatgccagctaagaaatgacggggtaatttaacgcttacgaaactatattcggcaaaagctgcgcgcaaattgcacctcatcacatgaagaagcagatatatattatgagcagccagcagccagaaaacggtcttaagcaacgcctggatttcatcgagctggatgacagcgcgcgtcaatcgctgcgccagatgcggccggcgatttccgagatgctgggtggtgcgctcgaccggttctacggaaagctggcgcgcacgcctcaggtcgcgagcttcttttccgataaatcgcacatgaaccatgccaagtcgcggcaggagacccactgggccaatctcgccggcggcaacttcgacgaagcctacgtcaagggcgtcgtcgcggtcggcaagacgcatgcgcgcatcggcctcgagccacgctggtacatcggcggctacgcgctcttgatgagtgatctgatcaggggcctgatggccaaggaatggccatcgcgcttcggtcgcggccagggcaagctgctcgccgaaaagctgaccgccgtcgtcaaggccgcgatgctggacatggactactcgatctcggtctatctcgaagcgctcgaagaaaagcggctgaagctcgaggaagagcgccagaaggcggaagccgatcaggcgatggcgctgagccatctgcgccgtggtctcgaagcgctgtcgcggggcgatctcgaagccaccttgcccgatgatctgccgggcaatttcaaggacatgggcgacgactacaaccgcgccgtcgcggcgctgcgcgcctccttcgcatcggttcgcagcacgtccggcgagatcctgcgtggcaccgatgtgatcgccaagggctccgacgatctggcgctgcgcaccgcgcagcaggcagccggcgtcgaggaaagctcggccgcgctgcagcagctctccgtcagcgtcggccagacggcatccaacgccgagaaggcgtccgcggccgtgcgcgaaacacagcagaaggcgaagaactccggcgaactggtcaccagcgccgtctccgccatggccggcatcgagaagtcgtcgagcgagatcaccaagatcatcggcgtcatcgacgacatcgccttccagacaaaccttctcgcgctgaacgcaggcgtcgaagcggcgcgcgccggcgaggcgggcaagggttttgccgtcgtcgcccaggaagtccgccagctggcgcagcgctcggccgatgccgccaaggagatcaagaagctgatctccgagagctccgcgcaggtgaaccagggtgtcgacatcgtcagcagcaccggcgaatccctgagcgacatgatcgatcgtatcgacattatcaacagcttcgttgccgatatcgccgccgccgcccgcgatcaggcgaccggcgtcaacgaggtcagcgtcgccatccgcaacatggacaccatcacccagcagaattcgggaatggtcgagcgcacgtccgccgaaacccgccgcctccgcaacgaggtggaaggcctggtcggcctgctcgagcgcttccgcatcggtggcgccacgcgaccggcccacgaggcgccgcgccgcgccgcctgaggcgaaagtgtcgaaatgacgacggcggcgtaaaaaagcgccgcctccggctttcggataattccatcccgcaaaaagatgcgttatgggaacgccatgaccatcaagccactcatcattcttcccgatccgttgcttcgccaggtttccaagccggtcgagcgcgtcgacagcgatctgcagcgtctcgccgacgacatgctggagaccatgtacgatgctcctggtatcgggctcgccgccatccagatcggcgttgcgcgccgtatgctcgtcatcgacgtctcgcgcgagggcgaggaaaagcagccgctcgtcttcatcaatcccgagatcgtcacctcctccgacgagcgctcggtctatgaagagggctgcctctcgattcccgattactatgccgaggtcgagcgcccggcgaccgtgggcgtcaagtatctcgaccgcgacggcaaggagcagacgatggaagcagacagcctgctcgccacctgcctgcagcacgagatcgaccacctgaacggcgtgctcttcatcgatcacatctcccgcctgaagcgcgagatggtcatcaagaagttcaccaaggcctccaagaccaccaaggcgctctgagcctcgcgttgataacccgggacccaagtgctatgatatcagtgatatcgtagtggaggtgccagatgggtgatcttctgatccgtggccttgatgacgacttgaaggcgcatctgcaggagcgtgcgatccgcaatggtcgcagtctttcgcaggaagcgatcgaaatgatgcggggccagatcctcagggagcaatcgctcgtgcccgcgggaaatcgtttgcgagggttgttgggagatgagcggctgacggcggatgaggtcgagaccttttccgagctccgtcatgaaaccgatcgcgatccgccgcgcttcgaaccatgatcgttctcgacaccaacgtgatctccgagatccagggccggctcaacagtgaacgtatcctgacctggctcaacgggttcgagatcgagtccctgttcctgacgaccatttccattggcgagatgtattacggtctgcatctgctcgacgaaggtcgccggaaggcatcgctgatcgcggatttcactcggatcgaggccgactttgccggtcgtgttcttggcttctccatcgaggcggcgcgccgctatggcgcgcttgccgccgctcgtcgaaatgtcggccgctcgatggagaccaaggacgccatgatcgcatcaatctgcctcatccacggcgccacgctcgccacgcgcaacacaaaagacttcgaagggcttgatctcaagctcgtaaacccgtttgaaggcggctgatcttcaagattggccttgagccaggaattggcggcacacaatgtctcttcgcatcatcttcatgggtacgcccgagttctccgttccgacgctgcgcgcgctggtcgatgccggccatacgatcctcgccgtctacacccagccgccgcgcccgggcgggcgtcgcgggctggatctgcagaagtcgccggtgcatcaggccgccgagctcctggggcttcccgtcttcacgcccgtcaatttcaaggatctggaagagcgcgagcgcttcgccgcccacaaggccgacgtcgccgtcgtcgtcgcctacgggctgctgcttcccgaagcgatcctcaacggcacgcgatatggctgctacaacggccacgcctcgctgctcccgcgctggcgcggcgccgcccccatccagcgcgcgatcatggccggagacgaaaagaccggcatgatggtgatgaagatggacaagggcctggacaccggcgccgtcgccatcaccagcgaagtggcaatcggcgaaaacatgacgtcgggcgagttgcacgaccggttgatgctcacgggcgcgagggcgatggccgaggccatggtcaagctcgagatggacgatctgccgctgacgccgcagcccggggagggcgtgctctacgcatcgaagatcgacaaggccgagacgcgtatcgatttctcccgtgacgccgccgacgttcacaaccacattcgcggtctggcgccgtttccgggcgcctggttcgagcttgagttcggcggcaagcccgagcgcgtcaaggtgctgggctccgagcgcgccgagggatcgggcgctgcgggtgaactgttgagcgacgatctcgtcgtcgcctgcggcaccggcgccgtgagattgaccaggctgcagaaggccggcggcaagccgttggcagccgccgacttcctgcgcggcacgccgcttgccaagggcacgaggctcgcctgatgttccgctaccgcatgatcgtcgaatatgacggctcgcaatatgtcggctggcagcggcaggaaaatggtccctcggtgcagggcgcgatcgagaaggccatcctctcggccagcggcgatgtggtgtcgatccgcggtgcaggccgcaccgattccggcgtgcatgccatgggccaggtcgtccatgccgacctctccagggaatggtcgcccttcaagctgcagaacgcgctgaacgcgcatctgaggctggcaggcgagcgcgtcgcgatcctcgatgtgacaaacgccagcgaattcttcgacgcacggttctcggcgctgcgccgccactatctctaccgcatcatcagccgccgtgcgccgctggcgctggaggccggcaaggcatggttcgtggcgaagaccatggatcacgaggtcatgcacgcagccgcccagacgctggtgggaaagcacgatttcaccaccttccgctccgcccattgccaggccaacagcccggtgcgcacgctcgaccgtctggatgtgacgcgatcaggcgatctcatcgaaattcgcgccaccgcgcaaagcttcctgcacaaccagatccgctccttcgccggcacgctgaagcttgccggcgaggggcgctggacgccggatgatgtgcgcgcggcgctggaggcgagggaccgcaaggcctgcggcccggtcgccccgcccgacggtctctacttcatgcaggtcgattatcccgacgtgatcgtcgaccgcagacaggaaacggaaacaaccgatgacgacgacgatctatcataaccccgcctgcggcacctcgcgaaacgtgctggccatgatccgccagtcgggcgaggaaccgttcatcatcgagtatctgaagaccccgccgagcggcgagacgctggtcgcgctcatcgccgaaatgggcatccccgtccgcgcgctgcttcgagagaagggcacgccctaccacgacctcggccttgccgatccggatctcgacgacgaacacctcctcgacgccatgctcgcccacccgatcctcatcaaccggccgatcgtccggaccaccaaaggcactcggctctgccgtccgtcggaagtcgtgctggaaatcctggagaacccgatcggcgccttcaccaaggaagacggagaaatggtccggagcccttaaaccgggtagatccccaggaaccgctgcatgaattccgacagcatcagcgccggcacgaacagcaccagggtcatcgcgccgatcagcgggccgttgccgttgaagatcatcctgaggatgcgggcgatggcgaagacctgggccagcatgaaggcgagcagcagcagcgagacgatgccgatcgtgccgggcaaaaagaacaccagcgccagcagcaggccgttgatataggagagcggcacgccaagccagttgacgctgacgatcacatggccgaagcgctcgcctttcttcatgatcagcagcagcaggccggccagcaccagcggcacgaaccagttcgccgcctccaccagccccaggcgaaaatagaagaccgggctgacatccgtttgcggcggcatcgtgcgcaggaaggattcgcgccaccacagccacgaaatccccatcggcggcaggcaccagacgaaggcccagaaggagcgattgacgccccggtccgacatgtcgagaaaacggaagccggccggatccattcggatcagcaaccagaggccggccagataatattggacttccctaaatcccggcattctcgaaccagcgcgcgatgaaggtttcatagacgacggtcagccgctcgaggtcatcaaccacgacgcgttcgtcgatcatgtgcatggtttgacccacgaggccgaactcgacgacggggcaataatccttgatgaagcgcgcatccgacgtgccgcccgtggtcgacagcgccggcgactggccggtcacgctttcgatcgccgaagacagcgaggcgatcagcgcgttgttgcgcgtgaggaagacgtggctcgggcgctccgcccagacgagatcgtatctgaacggagcacgacccggccggagcacgccttcggaggcggcggcatcgaggcggcggatgatctcctgttgcagcgtttccgccgtccaggtgtcgttgaagcggatgttgaagctcgccgtcgccttggccggaaccacgttcgtcgccggattgccgacatcgacggtcgtcacttcgaggttggaaggctggaagttctcggtgccggcatcgaagggcgggtgcatcaatgcctgcgtcaattgcaggatgccgcgcacggcgttatcggccagatgcgggtaggcggcatgcccctgcacgccatgggcggtgatcttgcccgtcagcgatccgcggcggccgatcttgatcatatcgcccagcctgttcgggttggtcggctcgccgacaaggcaggcatcccagcgctcgccgcgctcggctgcccattgcagaagcttgatcgtgccgttgatggcgggaccttcctcgtcgccggtgatcaggaaggacacggatccatcaggcgcgccatgcttttcgatatggcgggcgatcgcggccacgaagcaggcgatgccgcccttcatgtcgaccgcgccacggccgaacagctcgccgcccgcgatctcggcggcaaagggcggatgcgtccacgcgccttcgtcgcccacgggcacgacatcggtatggcctgcaaacatcaggtgcgggccgtcattgccgagccgggcgtaaaggttctcgatatccggcgtgcccggctccgtcgccttcaccttgtcgaccttgaagccgagcggcgacagcatggcttccagcgccgaaagcgcgccgccctcggcaggcgtaacggatgggcagcggatcagggtctggagattggcaatgggatcggtagcggtcatgacagtggaactatccggcggtaatggcaaagaaaaggcaaggaagagttgcgcccggtgaaagccgcgtccggctttcaccggctcgatatagggcggaaactcgtgcgttgccgcgcatgggatcgttcacgcgcggcaacggatcgggtcttgatcagtcgcgcagcagctcgttgatgccggtcttcgagcgggtcttctcgtcgaccgtcttgacgatcacggcgcagtagaggtgcggcgcggcaaggccgttcggcatggtggcgttgcccgatggcatggaaccggcgacgacgaccgagtagggcgggacttcgccgtagaagacttcgccggtggcgcggttgacgatcttggtcgacttgccgatgtagacgcccatgccgagaaccgagccctcgcggatgatgcagccctcgacgacttccgaacgggcgccgatgaagcaattgtcttcgatgatggtcgggccggcctgcatcggctcgagcacgccgccgatgccgacgccgcccgagagatgcacgtgcttgccgatctgcgcgcaggagccgacggtggcccaggtatcgaccatcgtgccctcgtcgacgaaagcgccgaggttgacgaaggacggcatcagcacgacgttcttgccgatatgggccgagcggcgcacgacgcagttcggcacggcgcggaagcctgcggcgcggtattcgttctcgccccagttctcgaacttcgacggcaccttgtcccaccaggtcgaattgccggaaccgcccttgacgacttccatgtcgttcaggcggaaggacaggagaacggccttcttcagccactgattgaccttccagacgccgtcggcgccgcgctctgccacgcgcaccttgccgccgtcgagaagctcgagcgcggtttcgaccgcatcgcgcacgtcgcccttggtcgaggtgttgacgctgtcgcggttgtcgaaggcggcttcgagggtcttttcgagggcggagaggtcggtggcgctcatgagaattccttaaacttcgatctttatcgttggaggcgagggcctccgggaattgtgattggcgggatgcgatctgctctatcgcatgcagggctaaaatggaatgatttttcgggacggccgggttcccgatcacggctgcgcaacgacatacggcaggtgctgccgcaggactgaaaggcattggaatgacaaaggcgaaaaacggcaggttgcggcgcaaggacggcgtctgggatccgttgaaatcaagcgagacagacaagcagcgcgccgaagccgtgccgaaaacgccgcagaccctgtcgccggcctatcgccttgcctatgccgaccaggacttcctgtgccgcgaggaactgcggccgatccgcctgcaactggaactgttgaagccggaaatgctgctcaccgagctcggcatcaagtcgaccgtcgtgatgttcggcggcgcccgtattcctgcgcccggccagagcgcctgggctgcccgcaacgaaacccagcgcaccaatctggaggcggcgtccgtctattacgacgaggcgcgcaagttcgcccgcctgtgctcgaaacacgccgccggattcgatttccacgagtatgtcgtcgtgaccggcggcggaccgggcgtgatggaggcggggaaccggggtgctgccgacgagggcgcgccctccatcggtctcaacatcgtgctgccgcatgagcaggcgccgaacgtctatgtgacgccggagctcagcttcaacttccactacttcgccatccgcaagatgcatttcatgatgcgcgccaaggcgatcgccgtgttcccgggcggcttcggcacgctggacgaattcttcgagtgcctgacgctgatccagacaggccgcatggaaaagatgccgctcatcctcttcggcgaaaagttctggaaaagcatcgtcaatttcgacgcgcttgccgaattcggcacgatcgcgcccgacgacgtcaacctgatcagcttcgtcgacaccgccgacgccgcctggaagatcatccaggacttctacgaacacccggagtagggggctccactaagacacggaaaagcccgccgcgatcgtcgcggcgggctctgatgccggtcgtttcctgtcttgcaggccctgccttacaggccccgccttagaggaatgggcgttgcggcatgtcggcgatcgagatgacaccgtccttgttggtgtccatgcgcgtgaagaacttctcgaaggccgcttcggcttcctgcttggaaatctggccgttctcgtcggtgtcgatccgctgcatcagcatcagttcgcgcatcatgccggggccgcgcatgccgttgcggccgggaccacggttggcttcgggctgcggcggtgcgggctggcccgcgtcggcatcggccggaggcggtgcgggtggtgcttcgtcgtcggcggccatgtcgtccgcggatgccttgatcttggcgatctgcgcttcctgatacttgcggatttcccccggtgtcagcgagccgtcattgtcggtatcgatcgccgcgaagatcgtcgtcatgccggtcgtggcttcgtccttggagatctggccatccttgttggtgtcgaactgctgcagcatgcgcacgaaggcgacttcgcgcatgacaggtccgcgcatttcgccgcccatcatcatgtgacggggcttctgcggatgcttctgcttgtcgccgggcgcggcaaaactgctgccggctgcggcaccgacgatcaggacggaggaaagtgcggccagtatcagcttgttccgagacatttgggttcctttcactgtgcgatctcaatgcggatcacagacgaaaaggtagggcgcgctcgcccgattacccagttaaacatcggtaagctggatgaaactttcgtaatttagcgcgtgatcttgccaaggaaatcagtgagatcgtcggtcacgaagtcgatgtggtcatcctcgccgctggtcttttcccaccactcgacgaccgtgtcctcgaggttgttgggcaccaggagcacggtctgcatgccaagcgccttgggcactgtcaggttgcgcggcagatcctcgaacatcgccgccttgcgcgtctcgacgcgcttcagctgggtgaacttgtcataggtttcctgcgccggcttcggcacgaattccgccgcgacgatatcgaagatgtcatcgaaatggtcgagaatgccgagcgcgccggccgccatttccgcatgcttgacgctgccattggtgaagatgaacttgcggcccggcagggatttgatcgcggcgcccagttccggctgcgccgtcaggctggaataatcgatcgcatgcgccttctcgaggaagtcgttggggtcgacgccgtggtggatcatcagcccctgcagcgtcgtgccatgctccagataatactgcttctgcagcttgcgcgcctcatcgcgctccatttgcagcagcgtcgagacataggacgtcatgttcgtgtcgatctgcgcgaacagattgacgtgatgcggatagagtgtgttgtcgaggtcgaagacccactctgtcacatgcgcgaagtcggaatgggtgggcgtgcgatcgatcttgctcatgcctgccttatggcacgcgtcgcgttcgattgaaatccggaatgcgaccattcacgcccgttgattgatcgcctgacgtgatcgcactagctttccggcacacgaagtgaggaggagaagatgaatcaagctgagaaggcaaagacgttcggcgcgctgcaccagaagggcaatcctgtcgttctctacaatgtgtgggacgcgggaacggcaaaggcagtgaccgaggccggcgccagggcgctggcgaccggcagctggtcggtcgcagccgcgcagggctatggcgatggcgagaagatcccgatggaagcgctggtcgcaacgacccgccagatcaccgcggtcaacgatctgccgctctccgtcgatttcgagggcgcctattccaccgatcccttaggcgctgccgcgaatgtcgagcaactgatcgatgccggcgcgatcggcatcaatttcgaggatcaggtggtgggcggtgatgggctgcacccggtcgagaagcaggccgcccgcatccgcgccatccgcgagatggcggatcgccgcggcattgcgttcttcatcaatgcgcgaacagacctgttcttgcgcgagggcgatctttcgaaacatgccggtctggtcgaggaggcgctggagcgcggcaaggcctatgcggccgccggtgccgatggcttcttcgtgccgtggctgatcgatgaagccttgatcgagaagatctgcgctgcctcgccgctgccggtgaacatcatgatgcggccgggcgcgcctgatgtgaagacgctggcgaagctcggcgtcgcccgtgtcagctatggaccggggccatatcgggcgatgatggagaagctgaaagaagcggctgctgtggtttacgggacgctgtgaggtagacccctgtaaggtagacgtaagatagacccctccccaacccctccccacaagggggaggggcttgctgggcgcgccctctccacgagaccgaagcctctcgacatatgcagatggtgtgagatggcacaaagggcgcaacgcgttagcccctcccccttgtggggaggggttggggaggggacttaatcccgaccgcaacagaaaaaataccgccctcagggaacgatcagcgttcccgcgccgcgctcggtgaagatctcgagcagcacggaatgggcggtcttgccgttgaggatgacgacgccctggacgccggccttgatcgcgtcgatgcaggtttcgactttcgggatcatgccgccggaaatcgtgccgtcggcgatcagctggtgcgcctgcgagacggagagttccttgatcaggttgccctgcttgtcgagcacgccgggaacgtcggtgaggaacaagaggcgcgtcgcgttgagcgcgccggcgatcgcgcctgcgaaggtatcggcattgatgttataggtcgcgccgtcgcggcccggagcgaccggggcgatgaccgggatcatttccgagcgggcgagcaggtcgatcagcgtgcggtcgacttcaacgacctcgccgacgaagccgaggtcgagaacgcgctcgatgttgctgtccgggtccttgatggtcttgcgcgccttttcggcgaagaccatgttgccgtccttgccgcacaggccgatcgcccattcgcccgtctggttgatgagggcgacgatttccttgttgatcgagccggcgagaaccatctcgacgatctcgaccgtcttggcgtcggtgacgcgcaggccgccttcgaatttcgattcgatgcccatctttgtcagcatggcgccgatctgcggtccgccgccgtgaacgacgatcggattgacgcccgattgcttcaggagcgcgatatcgctggcgaacgccttgccgagctccggattgcccatcgcatggccgccgtatttcacgacgatcgtcttgttctcgtaacgctgcatgaagggcagcgcctgcgccagcagccgtgcctggatttcgctttcggtctcggtcatcggataccccgcagaaaaatggttgcggccttttatcccaagtttttgacagatggaataatcattggcccgatagttcgcgcaatttgcccataccccgccgtcttgccaagcgtgaccgaacacccatagttagggaaggacattggggaagagacacggcatgacgagcgaggaaatcgccgaactgatcggtcgggttgcaatgcgcgaccgaaaggctttcgtggctctgtaccgtgaaacaagcccgaaactttttgcgatctgtctgcgtatcttgaaggacaagacggagggggaggaagcattgcaagaggtctatatcaaggtctggcaacgcgcttccgccttcgcgatctcctcgggaacgccttcgtcctggcttgcggcgatcgcgcgcaaccaggcgatcgataccctgagaagccgcaagccggtagccgacgaattggacagtgcctatgatctcgcagacagccaacttgatccggaagcgacaactgtgatccgcgatgaaggaaggcggattgacacctgcatggaacagttggaagctgatcgtgcggtggcggtcaggcgggcttatgtcgaagggctgagctatcaggaactggccgatgagttcggcgtgcccctgaatacgatgcgcacatggctgcggcgcagcctattgaagctgagagagtgcctggaacgatgacgtcgtccgatcaaagcaagggaggtcgctcccgcgatgaggtactcgccggcgagtatgttctcggcgttctgtcttttcaggatcgccgtgtcgtcgaggaccgcatgcgcgtcgaccggcagttcgcggcgatcgtcggccgctgggaagcgaacctctcaacgttcaacgacgattacgatgccgtcacccccggtcaggaaaccttcaagcaggtcgaagcgcgtttgttcggcgtgccgcagcaggccgccgcgccgggcaggggcgtctggaactccatcttcttctggcgctgtctcgccgccgtctcgctcgtcatcacctcggcggcattgtcgctgacggtggcgacggtctcgccattgaagccgaccgtcccgccgctggtcgctcaattgtcggcgcccgccggccaggtcaatctgctcgcgtcttacgaggcgcagaccggccggatgcggatcgttccggtggccgcgggcaagccggaggagaagtcgctcgaactgtggttgctgccggaaggcggcacgccgaaatcgctcggcatcttcgccgcgggagagggcggcgatggcgaactggtgatccccgtggacatgcgctcggcgatcggcgagggcacgagcttcgcggtcagtctggagccattcggcggttcgccgacgggcgcgccgaccggccccgtggtcgcaagcggcgccgcgcgccggccgtgagaccggctgaaactttttccatccacccttcgtagatcctcatgtccgtgcgacgccgatgcattcagccggcgacccgcgagcggactgatgaggagaacagtcatgatcaagttcgcgctgcgcacggcagcccttgcaatcgccgtatccgcaatcgctttcgccgcgcaggccaagaacccgatggtcggcggcgccgccatgtatccgaccaagaacatcgtcgaaaatgccatgaagtcgaaggatcacacgacgctcgtggccgccgtcaaggcagccggcctggtctcgacgctcgaaggcaagggtccgttcacggtcttcgcgccgaccaacgaagccttcgcggcactgcctgccggcaccgtcgatacgctgctgaagccggagaacaaggcgaagctcgtgaagattctcacctgccacgtcgttgccgccgacgccatggcaaagaccgtcgccaagatgatcaaggatgacggtggcgagcacgacatcaagacagtcggcggctgcgtgctgaaggccaaggaaagcatgggcaagatcacgctgaccgacgagagcggcggtgtcgccaatgtcacgatcgccgacgtcaagcagtcgaacggcgtcatccacgtcgtcgacaaggttctgctgccgaagatgtaaccggtagttcaggcagcaacgggaggcgcccctttacacccggggcgcctctttcacttccagttgtcgacgccaacagtcagcgcgatcgccgcgcgcagatcgtccagaccctcgctcttttccgaggaggtggcgatgatgccggggtaggcggcggggcgtttcttgatcttttcggccgtctccgccaggagcttgaccacggctggcggcttgatcttgtcggtcttggtcaggaccacctgataggagacggcggccttgtcgagcaggtcgagaacctcgtcgtcgttcttcttgatgccgtggcggctgtcgatcagcacatagacgcgcttcagcgtcgcgcgcccgcgcaggtagtcgaacaccagcttggtccaggcgtcgacatgctccttgggcgccttggcgtagccgtagcccggcatgtcgacgagcgccatcggcggcagatcgccggcctctccggaataaccgtcgggcacgaaatagttcagttcctgcgtgcggcccggcgtgttggaggtgcgcgccagaccatgctggccgacgagcgcgttgatcagcgacgacttgccgacattcgagcggccggcgaaggcgacctcggccggtccttccggcggcaggaacttcagggacggcacgccgcggatgaagatccaggggcggccgaagagcggcttgttgttgttgtcggtcattcggccttttccagcgcgtccaattccagtgaacctatggcattcaggtttcgggcgattttgtcaaccggcagcgaagaatgtcctgagaagcggaatgccacaaaagaaaaagccccgccgaagcagggcttttcgctatttttccgttggcgccggctttcgcttgaacagccccttcagattgtcgaagagttcgatcttcacgccgtggcggcgcatgatcaccgcctgctgcatcaccgaaagcgtgttgttccaggcccagtagatgaccagaccggccgggaagctcgccagcatgaaggtgaagaccagcggcatccagttgaagatcatcgcctgcgtcggatcgggcggggtcgggttcatgcgcatctgcaggaacatggtgacgcccatgatcagcggccagacgccgagatgcaggaaggtcggagcggcgaacggcagcaggccgaacaggttgatgaacgaggtcggatcgggcgccgaaaggtcctgaatccagccgaagaacggtgcatgccgcatctcgatggtgatgtagatcaccttgtagagcgagaagaagatcgggatctgcagcgcgatcggccagcaaccggcgatcggattgatcttctcttccttgtagagcgccatggtcgcctgttgcagcgccatgcggtcgtcgccgaacttcgccttcagctcttccatcttcggctgcacgcgcttcatgttcgccatcgaagcgtactgcttgctggcgagcgggaagaacagcgccttgacgacgatcgtggtcatcaggatcgcgacgccgaagttgccgaagtaacggaagaagaagtccatcagtttgaacatcggcttcgtcaggaagtagaaccagccccagtcgatcaggcggtcgaagcgcgggatctggtaagtggcttcataaccgtcgatgacgggaacttccttggcgccggcgaagacgaggttcttcaattcgagcgtctggccgggggcgacggtcacggcgttctgcttgtagtcggcctggaagcgcggctgcccatccgtgaagtggctgaagcgtgcgtcgtaggcggtcgtctgcggcggaatgatcgtcgcggcccaatacttgtcggtgatcccgagccagccgccggtcgccgttgccggtgtcacggcttccttctcgacggccgtatacttgctttcgatcaggccgtcgtcgccgatgacgccgatgaagccttcatgcagaacgtaggtcggagcaacagccggcttgttgtagcgcgttatgcggccataggaggaaagtgccgcggatgcctgaccggcattggtgatcttgtcggtgatcgtgaacatgtagcgttcgtcaaccgcgatcgtgcgggcgaaggtgatgcccttgtcgttggtgtaggtcagggtaacaggggtcttctcggtcagcttggcgccttcgggggccgtccagagcgtcgaggggccgggaacattgccggtattggcgtcgccgatgtagccgagctcggtgaagtagccatccttggtctcggacgggctgaagagcgtgatgagcgggctggtgtcgtcgaccgtctcgcggtagcccttgagcttcaggtcgtcgaggcgaccgccggcaaggttgatcgagccggtcagtgccgcggtgtcgatgacgacgcgcgggttcttggcgagcgcgtcggcaagcgacgtggtggccggtgcctggcctgtcggagcagcgccgcccggctgcgcgccaccggctgccggtgtctgcgtctgctgggtcgtctgctgtgccttctgggcaagctcggccttgcgctgcgcttcgatgcgcggattcatgtaaaggaattgccacccgagaacgatcagcacggagagggcgatcgcaatgaagtagttgcggttgttttgcatcatacgttcctggggcggccgtctccggaccgcttgtgtttcggcttcgtctggacgcgagccttgagctcagcggctaattctttgaaggatgcttggagcacgtcccttcgcgcgacaaccacatagtcgtgtccgggctgcattgcaaaccctgcatgaagtcgcaccgcctctttcaggcgccgccgcatgcggtttctctcgactgcgttgccgtgcttcttggtgacggtgaagccgacgcgggcttcggtgtcgggttccttcctgtcgagcacctcgagaaggaagaatccacccctgcgtttttcgccattgcgaacagcaagaaactgcgggcggcttttcagccgcccggcagttattttgggatctttggtcgtcggatcgcccgtcatctgatcgggcacttccggccttaggccgaaagacgcttgcggccgcggccgcgacgagcaacgatgaccttacggccgcccttggtagccatacgtgcacggaaaccgtgacgacgcttgcgaacaagcttggaaggttggtaagtacgcttcatttattttaatcaccgcggagtgcggcccttcttgaatttgcataatgcaaggagcgttgtttttcgaacggcgagaggctcaaaaagccttatgtgaccggacgtgcggcggcttatacggacgaaggtcgcgaaagtcaattataccagccagaatcccgcctgctcgccatttgagtgtgaaaattagcgattgctgttaatgattgcgccgaccggtcaatatcatggtcgctatcattttattctgtttatgcagccaaaacgtgcgttcaatcggtttatatacttttcccgcgaaaaaatatcggcggcaatcatcgtttacaggtgattttttatagtagccgacgaaagtatcggaaattcaacattaattgttttagcccaatttgaagcaacggccgggcatccagttttcggcttctatgtttattggggggttcctttgaaaattcgaggtaagatcaacatacttgtctgcgccatgtcttgtgtcgcgctggttatcggcgcgacggctctttgggccgtgcagcgctacaacgaaaatctcaccgcctacgaggatgccgccagccgcgcctattccggcgagcgcttgaaccgctatgtgaccgcgaccgtgatggaagcgcgcggcatctatggcgccccctccacgaaggaagccgcaagcttcgccaagggtctgcttgcagccctcgatcaggtggacgccaccatcgcatcctggacgcctcttgtgccggaaaatcagatggaggcgttcagcaagctcaaggcccgcgccgccgaattccggaccttccgcgcggaaaccgcgcgtctcggcacggaagtcagcccgcaagccgccaacgagcagggcaacaacgacgccaaccgcgccaaccgcaaggccttccaggccgagatcgacgcggttgtcgccaccgacagggcaacgcttgacgccgtcaacgaggaagtcgaaaacttccgcacgtcgatcctgtggctggttctcggcatcaccggcgttggcatcgcggccggcatcggcatgggtctttatgtcggcaccatccatctttcccgtccgatcaagaaagtcaccgaagccatcaacaatgtcgccgacggcaacttcgataccgaagttccgttccccggccgcaacgacgagatcggcgagatggccgccgccgttgccgtgttcaaggaaaatggccttgccgtgcgccgcatgaatgcccaggaagcggccatgcgcgccaagagcgacgacctgcagtccagcatgtcggtcgtggtggccgccgccgccgccggcgatttctcgcgccggatcgacaaggactacggcgacgagaacctcaaccagttcgccagcaacatcaatcatctgctgtcgggcgtcgatggcggcgtcggcgaaacccgccgcgtcatcgccagcctctcggaaggcgacctgacgcagaccatgcgcggcaatttccagggcgccttcgcggaattgcagaagaacgtcaacagcaccttcgccacgctgcaatcgaccatgcgtgaagtgcgcgaaaccgccgagggcttccacggcaacaccaacgagctgcgctccgccagcgacgacctctccaagcgcaccgaacagcaggcggcggcgctggaagagacctccgccgcgctggatgagatcacggccgtcgtcaacaactcgacagatcgcgcccaggaagccagcgtcatggtttccgaggccaaggacgatgccggcaagtcgggcgtcgtcgttcgcaacgccgtcgatgccatgggccgcatcgagcaggcatcgcgcgaaatcagccagatcatcaacgtcatcgacgagatcgctttccagaccaaccttctggcgctgaacgccggtgtcgaggccgcgcgcgccggtgaagccggcaagggctttgccgtcgtcgcgcaggaagtccgcgagctcgcccagcgctcggcaacggccgccaaggacatcaagggcctgatcaccaaatccggcggcgaagtccagatcggcgtcaagctggtgcaggaaaccggcgacgcgctctcgcagatcgaacgccgcgtcaatgcgatcaacgaccatatccactcgatcgccacggcggccaaggagcagtcgaccggcctcaaggaggtcaacaccgccgtcaaccagatggaccaggtgacgcagcagaatgccgccatggtcgaggagacctcggccgccacgcacaagctgtcgtccgaagccgatagcctcgtgcgcctgatctcgcgcttcaaggtgtccaacgtgcagcaggcggcacccgttgccgtcgccagatacgaggaacaccggccggtagcctcgcccgcccgccgcgccatgggcaacgttgcccgcgccttcaacggcaacgccgcggtcgatcagagctgggaagaattctgatttcgcggtgccgagatgactgagaacgccgccttcgggcggcgttcgcgtttcggcaatatgtcgcaccgctcgcaaagatttgaacgcggcgcggaatcgtctaatatagagattgtagtcgtggcgcgagacgcccgttggacgagaagcgatgcccgcccctgatcaaggccaaactgttcccgaagcactgaccacggtgaccgatgccgcgcgtgccgcctgccggcccgtcggcatgttcggcggcatatccggcaagctgctgtggctgacggtcgtctgcatcatgcttgccgaagtgctgatcttctttccctccgtggcgtcgatgcgcctgcgctggctggacgagcggttgaacgccgcggcgggcgccgccattgccattgatggcctgcagcccgcggatcttccggccgacctgcagaagcagaccttggaggcgacgggcactaaggcgatcgtgctgcgcaaggacggtacctcgcgcctgctcgccacctgggacatgccggcgtcggtcgacgcgcagtacgacctgaccagcgtgcctcccgtcaccgccattcgcgatgcgctcgacacgctcgtcttcggcggcgaccgaatgattcgcgtctatggtccggtgcgggacaccaatatcggcgtcgaagtgctgatgagggacaagtatctgcgcaatgcgatgctgctctacgcgcgcaacgtcttcatgttgtcgatcatgatcgcgctgtttaccgcgacgctggtcttcttcgcgatcaaccgcattctgatcaggccgatccgcaggctgacgggcagcatgcagcagttttccgccgatcccgaaaatccgcagcatgtttttgtcggcgaaggcggacgcgacgagctggcgatcgccggccgccatctgaccgccatgcagctgcagctgcagaagacgctgaagcagcagagcaatctcgcggcactcggcctggccgtctccaagatcaaccatgacatgcgcaatatcctcgcctccgcgcagctgatgtccgaccgcctggtcgacgtcgatgatccgatggtgaagcgcttcgctccgaagctgctgcgcaccatcgaccgcgccgtcggctacacgaccgaagttctctcctatggtcaggccagcgaatcggcgccccgccgtcgcctcgtgcgggtgatcacgcttgtcgaggatgtccgcgacatgctggcgatcgatccgcagagcggcgtcgaattcatcgagcagatcggcgccgatctggaggtggatgccgacaacgaacagctgttccgggtgattcacaatctgtgtcgcaacgcgttgcaggcactgacatcaggcaatggcgggggcagtgccggcgacacgccgcggcgcatcaccgtctcggcccaccgcatcggcagcgtcgtcagcatcaccgtcgacgacaccggtcccggcatgccgcagaaggcccgccagaacctcttcgccgccttccgcggctccgcccgctccggtggcaccggcctcggccttgccatcgcccgcgagctggtgctggcccacggcggcaccatcgcgcttgtggaaaagccgtcgatcggcacgcagttccgcatcgaaatcccggatcgccctgtgtccctggaggattatcgcggccgcagcctgtccgaaaagtgatgcgatcccgcgatcccggcggcccgacaagaaagacgtcactttttttacaaaccctattgcattcgttcagatgaccctttagagaaccgctcacgccagcgggacacaccgctgcagacgcacccgtagctcagctggatagagcaccagactacgaatctgggggtcaggagttcgaatctcttcgggtgcgccatcaacttccattatgtttcagggcttccagtcagtttgaaaatcggtcgcgttcccacgcattccgatgacgttcccagacgtctattctcaacccgcctcaccaccgccgccgattgaccgacgaaatcagataccccacggcgaacgtcatcgccgccaccgcgatcgccgtgctgatgacgccggcgggcgttgttctggcgctgccctgtagcgtgatgtgctttccgatgcgaaggtcgaagaccgatttcatctcctccggatgcgacgggctgtcggatgagaggtcgtcttgaatggctgtcacgttcaatcctccgtttctgtgttgggcacccacgcgacgcgggcattttgcccggcgctagcctggcacaatgttgccggacgattgtctccgcaagatgccgtttgggcaggaagtgccgtggccgcgggccggagagattgaatgctgagcaatatggttcgtggactggtgtttttggcgtcggcggcagccttggccggttgtgtcgatcgcgccaacgggccgatgctgtcgcccgtcaatccgctcgacccgccgctcaatccgccgggcatcgcgcacaccatgtgcgtcgccgagggcaacgtcatgtatggtgaagcgcgccggcaatacgaggcgcgggcgcagatgtcgcgttacgcgatcgatccagccaatcaggaagcgcaggcgagggcggcggcgcgccgtcagtacgtcacctgcatttccagccagggctaccgcgcgatctacgatcagtagagggcgagcggtagagggtcgggatcacgcgcaatcgcctgcgatcacgactgttggagcgcgcgtgcaggcgcggaactttgcaagttcagacggcattttcctcatgtgaacctgaaggagggtttatcatgaaaatctcccgtcatatcccatccgccctgtcgcttggcctcatcgcggcgctttcggcggcggtgcccgttcaggccgcgccggccggctcgtccatgcagcaggcgtcggtcgtccaggtggcgcagacccagccgggctattggaacggctatcgcggatcgcgcaccgagcgtcccggcacccgccgccacaccgatggctactggtatccggacgccgccttcggcatcgaccgccagaccaccggatcgatcacccaacggccggtgcagacccagatgcaaccgatgcacagccagacctattgtcagggcacattcggcggcaccaatggcgacggctcgatgccgtgcggcaacggctggtaaagtcgtcgcgaaggcggcggtctctgccgtcgccttcgaccctcaagcgatgactcgagctgaaattgctcaagttttggttgatttgatgaaatgatgtgcacaagcagacggtgcctaacgatctggattcccgtgttatgcgttttgtgcattgctgcgttgcgggaatctccctattcctgatcgaaatcataggctatctatctcctcgaaggcagcgcactcctcctcccagcgctccttcatcggactgacaacactcctcctcccagttgtcagtcaggatcaagagcccggtgcacctcctcccgcaccgggctcttttctatttcggacctctcttcccgattttaattgctgacctgcattcttgattcggcggctccatcgtcgcaatcaaggtagcgccattgggcagcggtcgaggatgccgaaaattcagatggaagtcgcctggcttctgatatatcacagtgcggtcggcggcatggtccgccgcgcgaatgggcggtgaggaaatgaacgataggaaacggacggtcgcggtagttggcgcaggtgtcatcggtgctgcgatcgcgctcgaattgcagcggcgcggcctgcaggtgacgctgatcgacaagggcgagcccgggcgcggcacctcttacggcaacatggccagcatcgcgctcgatttcgccgccggctctggtcccaatacctggcgcaagatcccccgctggctgctcgatcccgaaggccccgtctggctgcgtcccgcctatgccttgaagatggcgccttggttcctgcgcttcatcgccgccggcaggccctcgcggctgcgtgacatcgaggatgcgggcatgagcctttcaaatcccgcgctcgccgatttccgcgccatgctggatacgatttcagctcccgagctgatgactgacgaaggatgcctggcgatctacgagaccgaggcggaatttacaggtgatcgcggccacatcgatttcatgcgccgctacggcttcgatttcgacgtgctcgaaggcgccgccatccgcgatctggagccctcgctgtcgccgtcgatcgccaaggcggttctgctgcccgacaacaagacgatccgcgatccctatcgcctggtggtcaagctcgccgccgccgcccgcgaacgcggcgcgaccttcgtgtccggcgccgtgcgcaccgtcgagaagaacgccgacggcacctccgtcgtgctgcttgagaacggcgagcgtgtcgcggccgatttcgtcgtgctggcggccggcgtccacacacgcttcctggcggaaaagctcggcgagcccatcccgctcgagaccgagcgcggctaccacacgcagatcatgcagccgggcgtctcgatgcgctattcggtgatctggccgcaccgcgccttcatgatcacgccgacggctggcggcatccgcgtcggcggcaatgtcgagctggcggggctggatgccgcgcccgattttcgccgcgcccgcgtcctcgtgcgtcatgcccagcgcgccgtgccgggccttgaggtcaaggacgccagcgagtggatgggccatcgcccggcgctgcccgatacgatcccgatcatctcgccgtcctcgaaaatgcagggcgtctggtacgcaaccggtcacggccatctcggcctcacttattcggccaccaccgcgcggctgatcgcggatatggtgacgggagccaaacccgccgtcgacatgacgccgttccgtatcgaccgctattgagacataacatgagagccggcggcgacgaggtcgctctgccggcggataatgggagacgccgatgagatggaagcgcacgatccagcttctggatgtccacgctgaaggtgagatcggaaaggtcgcgatcggcggcgttccgaagatcccgggcaacaccgttgccgagcagctgcactggctgaacaccgatccgaagggccaggagcttcgccgcttcctctgcctcgagccgcgcggcgcgccgatcggctccgtcaatctgttgctgccgccgaggcacccggacgccgacgccgccttcatcatcctgcagcccgatcaggcgcatgccagctccggctcgaactcgatctgcgtcaccacggcgctgctcgaatccggcatcgtcgagatgcacgagccggaaacggtggtgacgctggaaacggcggccggcctcgtcaaggcaaccgcgacctgccgcgacggtcgttgcgagaaggtcaaactgacaatggtgccgtccttcgtgcacgagctcgacgtatcgctggagacagaagagtggggtacgatcaagctcgacctctgctatggcggcatcttctacgcgcttgtcgatgtcggccagatcggcctgacgatcgccaagtccaatgccgcctccctggtagccgccggcatggtgatcaaggaaaggatcaatcgcgagatcaaggtcgtgcacccggagatcccggcgatctcgggtgtcgcctatgtcatgttccgcgatctcgaggccgatggcacggtgcgcacctgcaccaccatgtggccgggccgcgccgatcgctcgccctgcggcaccggaaattccgccaacctcgcgacgctgcatgcgcgcggcaaggcgaaggtcggcgatgtcttcaagtcgcgctcgatcatcgattccgaattcgaggtcgggcttctggccgagaccaccgtcgccggccgcccggccgtcatcccgacgatcacgggccgcggcttcaccttcggcctgtcgcaggtggcgctcgatcccttcgatccgcacccgggcggcttcgcgctgacggatgtctgggggccgctcgccggcgagatctgatcgccggctcagcggtcgtcagtaaggaaacgggtcgatctgggctttgctactgtcgcccggcttgcccggatggatcacgcccttgcgcaggatgatgttggcgtagaggcgcggctcgctggtctggatcagcgcatgcgccgccttcaccctgttgtagaaatcgggcccgaccagcggcaccacctgccggtgcggttcgtagtgggcgcagcagtcgatcatctcctcatgcacggggtcgagcttgtcgcgctcgcccttcacggtggcgcggaaaatcgcctccggcacgaaatcgtcgatcggcagcacgctgagcacggcatcgagcacgggaatgatgccgtgcccatcgagccggatcagccgccgcgcgtcctcgaggcccggataattgccgtcgacgatggcgatctcgtcgccatggcccatggcacgcagcgtcgagagcaactccgggctcaggatcgggttaagtcccttcagcattctccacctccttgaagagcacgttctggtccgtgagatagcgggcgaagatcggcaggctggcgccgccgatggcgcgcgcgtgggcacccaccgcgccctcgatgatatcgggcatgacgacgccctgcaggtcgagattgtccgcttcgtagatcgtcgcctgaacgatccgttcgcgaacccagggcgggaagccgccatcgatgacggcggcgctgaaatcgatgatcgaggcagccgcgacgatgccctgcgccagcgccttggcggtgtcctggatccacaattcgagcggctcgccgaagtcgatccagtcgtcggccgaataccagagtggttccggatcgatgccgcgttcgcgcagcatgttttcgagcacgaagatcgaggcgacttcgagcagctgcaaggtctcgccgttcttcccgcgcaccggaagcgggccgatcgcgccggccgtgccggtgcggccggaaaagatcgccgagttcagaacgatgccgccgccgatgaaggagccgatgaagaaatagacgaaatcgggatgctgcgggccgatgccgaagacgagttccgcgccacaggcgctggtcgcgtcgttctgcagatagaccgggtaggggaggctcgccgccacctcggcatgcaggtcgtaatcgcgccagacgtccatcgcgcctttgggcgagcccacttcctcttcccagttccacagctcaaaaggtgccgcaatgccgacgccggcgatccggctgcgctcgtcgtcgctcagccggctttccagttcctttatgccggaaacgatgaatttgagaaacagatcgggcagggggtaggcgtaggtgacatgcagctgcatgcggatcttgccgacgaagtccatcagcaccaggtcggcgctgcgccgccccatcttcacgccgaaggaatagaccgcatccggattgagccgcatcggaaccgacggctggcccacgcgtccgcggatcggctcgccgcgcgaaagcagcccttccttttccaatacgcgcatgatcaccgacacggtttgcgccgaaaggcccgtgcggcgtgcgatatccgccttcgactgggcgccatgcaggcgcaccaaagaaagcaccagtctctcattgtaggcgcgaacccgaacctggttcgcgccgcctgccgggctgacgccgggcagctgggccggcaagtgaaccggacctctcatcgacgacattggccattcctcccgttgatcggcctatgcgttattttcgccgagcatgccacagggaattaataattcaattggatttatttattgacaagctaaattctttcgcccttaattagtaccgtaaacagcgcgaaacggcttggaggaagccatcggcggtcgtctgaggcggtgttcgcgctttaaaattccggcaagccatggggcggtccggctacactctgggaggagtaaatgaagaaatcagtgctttccgccgcgctcgccgcgctggctctcggcgtcgccttctcggcgcccgcaaaggccgcggacgtctccgcctgcctgatcaccaagaccgacaccaaccccttcttcgtcaagatgaaggaaggcgcgaccgccaaggcgaaggaactcggcgtcaacctgaagtcctatgccggcaagatcgatggtgactcggaaagccaggtggccgcgatcgaaacctgcatcgccgatggcgccaagggcatcctgattgccgcttccgacaccaagggcatcgtaccgaacgtcaagaaggcccgcgacgccggcctgctcgtcatcgcgctcgacaccccgcttgagccgatcgacagcgccgacatgacctttgccaccgacaacctgctcgccggcaagctgatcggccagtgggccaaggaaacgctgggcgacaaggccgcggacgccaaggttgcctttctcgatctgaccccgtcgcagccgtccgtcgacgtcctgcgcgaccagggcttcatgatgggcttcggcatcgacccgaaggacccgaacaagatcggcgacgaggacgacaagcgcgtcgtcggccacgacatcaccaacggcaacgaggaaggcggccgtaccgcgatggaaaaccttctccagaaggatccgaccatcaacgtcgtccacaccatcaacgaaccggctgccgccggcgcctatgaagcgctgaaggctgtcggccgcgagaaggacgtgctgatcgtctccgtcgacggcggttgccctggtgtcaagaacgtcgccgacggcgtcatcggcgccacctcgcagcagtatccgctgcagatggcagcactcggcatcgaggcgatcaagaagttcgccgacagcggcgaaaagccgaagccgaccgaaggcaagaacttcttcgacaccggcgtgacgctcgtcaccgacaagccggtctccggcgtcaagtcgatcgacaccaaggaaggccttggcaagtgctggggctaagcgatcgggcctgagacccctcccaaccctccccacaagggggagggctaacccggccggttccgctgagcctcgattggggcaggtgggcgccgcaagtcttctccccccttgtgggggagatggccggcaggccagaggggactttcccggtgcaacgactgtcaccccaggcggccgcaaggcaggcctggggaaagaccaccactcacatgcaatcgtcccgcgcacgcacggcggacaggattccgggaggaacatccatgagtgagccaaccgcggcatcgccgcatcacgattacgaaaaagtcctcaaggacagttcgaccgacgtcgcctcgttcgacacggacgacaagagtttccttcagaagttccggcatttcctgcattcgagcccatcggcggtctcgctgatcgtgctcgtgctgtcgctggtcatcttcggcgccttgctgggcaccaagttcttctccgccttctcgctgacgctcattcttcagcaggtggcgattacgggcatcgtcggcgccgcgcagacgcttgtcatcatgacggccggcatcgatctgtcggtcggcgccatcatggtgctgtcctcggtcgtcatgggccagttcgtcttccgctacggccttccggtcgagctcgccatcctctgtggctttgccgtcggcgcgctctgcggcttcatcaatggctggctcgtcgcccgcatgaagctgccacccttcattgtcacgctcggcatgtggcagatcgttctcgcgaccaacttcctctactccgccaacgagacgatccgcgcccaggaaatcgaaaccacggcgccgctcctccagctcttcggcgataccttccgcatcggcggcgcggtgttcacctatggcgtcatcgccatggtgctgctcgtagccttcctctggtatgtgctcaaccatacgccttggggccgccatctctatgcagtgggtgacgatcctgaggccgccgaactgtcgggtgtcaacgtcaagcgcatgctgatctcggtctacgtgctctccggcatcatctgcgcgctcgccggctgggccctcatcggccgcatcggctcggtgtcgcccaccgccggccagttcgccaacatcgaaagcatcacggcggtggtgatcggcggcatctcgctcttcggcggccgcggctccgttctcggcatgatgttcggcgcgctcatcgtcggcgtcttctcgctcggcctgcgcctgctcggcacggacgtgcaatggacctacctcttgatcggcgtcctcatcatcgtcgccgtcgcaatcgaccagtggatcagaaaggcagcaggctgatggcaaccgaaccccttctcatggcgcgtggtctcgtcaagcgctacggccgcgtcaccgccctcgaccacgccgatttcgatctctatccgggcgaaatcctggccgtgatcggcgataacggtgccggcaagtcctcgctcatcaaggcgatctccggcgccatccgtcccgatgaaggcgagatccgcctcgaaggccagccgatcaacttccattcgccgatggaagccagaaaggccggtatcgagaccgtctaccagaaccttgccctgtcgccggcgctgtcgatcgccgacaacatgttcctcggccgcgagatccgcaaaccgggcttcatgggcaaggtcatgcgcaagctcgatcactcggcgatggaaaagatggcgcggcagaagctcaccgagctcggcctgatgaccatccagaacatcaaccaggcggtcgaaaccctctccggcggccagcgtcagggcgtggcggttgcacgcgccgctgccttcggctccaaggtcatcatcctcgacgagccgacggcggccctgggcgtcaaggaaagccggcgcgtgctggaactgatcctcgacgtccgctcgcgcggcatcccgatcgtgctgatctcgcacaacatgccgcatgtcttcgaggtggcggatcgcatccacatccaccgcctcgggcgtcgcttgacggtcatcaatccgaaggaatacacaatgtcggatgccgtcgccttcatgaccggcgccaagtcagttcctacggagcctgttgccgcatgacgatgacgatcgaggatatcgccggcgaggtccttgcccgcgccggcgacgcgaagcgctttctgatcgccatcgccggcccgcccggcgccggcaagtccacaatggcagaccacatcgccgacgcgctgcgggccggcggcgaaactgccgcagtattgccgatggacggcttccacatggacaatgccatcctgatcgagcgcggccagcttgcccgcaagggcatccccgagaccttcgacgtgcgcggcttcctcgatatcatccgcgccgttcgcctggccgatcaggaagtgttggtgccggtgttcgatcgctcgcgtgagcttgccatcgcctcggcgcgtcccatctccccggagcatcgcttcatcatcgtcgagggcaactacctgctcttcagcctcggcaagtgggcggaactcgaaggcgtgttcgattattcgatcatgctcgccccgccgatcgaggtgctcgaggagcggttgtgggcgcgctggcgcggctacaagctgagcgaggaggaatcggcgcgcaaggtctatgagaacgaccttccgaacggccgcctcattctcggcaatcgccgccgcgccgacgtcacgctcgagatcgcctgatcgcaattgcccggctgcgatgggcaaaccatttgccatcgaacatgcttggatgtaattcccaaggctgagcctgaagcgcagccttgccggagttacagtcatgcaatcgatcaccatccgccgccccgatgattggcatcttcacctgcgtgacggcgccatgctggaaggtgtgatcgccgattcaagccgcgacttcgcccgcgccatcatcatgccgaacctcgtgccgccggtcgtgacgacaacggatgctgaggcctatcgaggccgcatcatggcagcacttccgaagggcgaccgcttcgagccgctgatgacgctctatctgaccgaacacaccgatcccgacgacgtggagaagggcaagacgagcggcctgatcaccgcagtcaagctgtatccagccggtgccaccaccaattcgcatggcggcgtacgcgatatcgacaaggccatgccggtgctcgagcgcatggccaagatcggccttccgctttgcgtccatggtgaagtcacgacatcggacgtcgatatattcgatcgcgaagccgtcttcatcgaaaccgtgctcgatccgttgcgcaagcgcctgccggagctgaaggtgacgatggaacacgtcaccaccaaggacggcatcgactacatcaagtcggctgagcgcaacctcgccggctcgatcaccacccatcacctgatcatcaaccgcaacgccatcctcgtcggcggcattcgtccgcattattattgcctgccggtcgccaagcgcgaacatcaccgcgtggcgctgcgccaggccgccacgagcggtgacgctcgcttcttcctcggcaccgattccgccccgcatgtcgacccgctcaaggaatgcggctgtggctgcgccggcatctacacctcgatcaacacgatgagctgccttgcccacgtcttcgaacaggacaatgccctcgaccgactggaagccttcgcgtcgctgaacggcccagcctggtatggccttcctgtcaatgaggaaagaataacgctggtgaagcgcgccgagcctgtgtcgtttccggccaggatcgagaccggcgccggtcccgtcaccgtattcgaccccatgttcccgctccattgggatgtcgagcgctgacagcgctcgtaaacccattagtttttactgggaggagagtatctatccgcggagatatgttattgcgctaacatctatgctttaaatacatgtttttttaacgaaattgataacacattcgctctcgggcaaattccattttctgaaaacgaaagcgtggcagaagccgcggagttcaaagcatgacgcttgactataattcattgctgaccgcgttggcggtctcggcggcatgtctcgccattaccgtgctggcgagctggattgcccggcgaaccgaaacatttctgctggcctgcggcatcggcctcattctgatcgtcagcggcatctttgcctatgggctctatgtcgaccagccgaacgtgaccgtcggcatcgtcaatttcgcgctcctctttcccggcttcgcgatggtgtggggggccgggtgccagttccgatcgggaaagttcccgcgcgggcgcgtggcggcctctgccgctgtcacaacggtagcggcgtcgctgcctatgttgctcggctacgacggcctggccttcatcatcgacaacaccgtcattgccgcgttcctgttcgccaccgcctatcaatactggcgcgcgcgatccgaggccgccgtgccgctgacggggattaccgccctttactgcctgacggccttttcgttcgttctctgcgccgttgtcctgatctatcagggcaagctcgtcctgggggtggctccaaagaactgggcggaagatctcagcctcgccgtctgtatcgccagcatgaccggcatcggcgcgctgtcgcttgccttgcaccaatggcgcatggcagcccgccatcgcatcgacgcggcaaccgatccgttgaccggcctgcttaaccgccgcgcgctcttcgatcgccacggcgccggcgtcatggggccgacgacggcggtgctggtcttcgacatcgaccatttcaagtcgatcaacgacagcttcggtcacgcggtcggcgaccgcgtcctcaagatcttcgccgccgaattgaccgccaattgccggctgagcgacacggttgcccgtcacggtggggaagagttcgccatggtgctgcacgaggtcatgcccggccgtgctgaaatcgtggccgagcgcatccgaaaggcgttcgaggaacgcgaactcgatatcgacggagagttgtgcaaatgcaccgtcagcgtcggcgtcgcatccggtcgcaccaagccgctgccattcgatgccatgctgagcgccgccgacaaggcgctctatgcggccaagcgcgccggccgcaaccgtgtcgagcttgcgagccacctgcaggccgtcccgaccgacacggcccgcaccgcctcttgacccgctcgcctcaggcagcccaaaggccgcgcgtcgacagatatccgaccgccccgagcaggatggccaccgccgaggcgagcccgagcgtcacggcatagtctcggcgtccggcggtaaaggccaacgccaccttcgtcaccatgttgaccagaacggcgatcagcgtcacgtcggccgccgtcgtggcgctgatcgtcgagcccacgaggcgcacggtcgagagcgtgatcgcgtccacatcgacgagaccggaaatggcggcgacgacatagagcgccgaggcgccgacatattcggtcgcgatcttcgagacgaggctgatcaggccgagcagcagcgcgaaggaaatcaccgtcctgagttcgaacggattggtcagctcgatcttcggggcctgcgtcgaggacccggagcgccaggccagaaaaaggctggttgccaggaagccgatgatggcggggatgagcgccgacgagagcggcgcgagcatggcgagcgaaagggcgctggcgatgacgagaacgcgtgcgaaggacagcgcgcctgcaatcgccgctcccgccgccagatgccgcgccccttgcggggcttccatcgaatagcgtgcgaaggagagcgtcagcgccgtggaggagacgagcccgccggccgctcccgcgagcaatatccctcggctcgatcccatgagccggatggccacgtagccggcgaacgacagcgccgcgatggtgatcgtcagaagccagagcgaataggggttgagcgcgccccaggggtcgagcgcctggtccggcagcagcggcagagcgatgacagtcatcgccagcagcatcagcgccgaccgcagctccacccaggtcagcccctgcaggaagccgtgaaggctggtgcgggccgcgagcacgacggtcaccgcgaccgcgccggcccctgccgtgatcagatcaccaagggcggcaagcatgccgagcgcgaacacgcaaagggccgcgatgatggacgtgatgccgtaatccttgtcctcgatcgcctcctgccacttgcccgcgatgtagacggcgccgagaagaacggcgatcgtggccggcaggaacgggccggtcagcggctgcagcgtgccgacgatgccgccgagaaagccggtgagcccaaacgtccgaagcccggcggtgcgcccgccggcgcgcacctcacgctctgtccagccccgctcgacgcccacgagcaggccgatggcaagcgccacgccgagacggcggaagagttcgatatggtccatgccctgcacgatatcgccgccgcgccgctaagcaagcgcaaacatttgaaaccattggcgcattagagatatcggcgctcgattgcgcgatcagatcaccatcagtgcccggacgaacgcggccgatgccaaaagcgacgccatcgttctcacatggttccaccacgtccagtcgcgaaggtagccttgccacagggcggaggcctcgggaccgttgccggaaacctgccccagcgcatcgttcatcggtacgttgaagatgatggtcgaggcgaaggaagcgacaatgtagatgatcgcgccggcgagcatccacaggctcgctccctcccgccagctcatcaccgcgagcacgccgatcaagaggcaaagaatggccgtcggcacgaacagcatcatgaagggtgagcgcaggatcgtgacgttgatcgagttcatcgccgcgatcccctgttccgtcgggatgcgcgaaaacgccggcatcacgaaggtcgagaacgcgaagaacgtcccggcgacgagcccgctaccgatcgcggcggcgacaagcgccaatacgagaatgattgccatgccgatgacctcccactttggctgcgccaaaagtcaataacagagaaactctctcatttgcaaaatgagataaactctcttatttctactgtcaagcgcgatggagcatcggatgacggacgaagcggcggcgggatcgcgaataaagacgggcgccacaaggcagccccggcgcattcctcgtcagcaaaggggccgcgagcgcttcgagaagatactgaccgttgccacgcaactgatcgaggcgaagggaagcgatgcgctgaagatgagcgagatcgtcgaaaaggccgatctctcattcggcgcgctctaccagtatttcccggataggagctcgattttcgcaacgcttgccgagcgcttcaacgaggagggccgcgcctgcgtggtcgcggcgcttgcggaggcgacggatgccgccacgctgcgtgcggcgctttgcaggatcgccgacgagtaccacgccttcttccgcagcgagcccgtcatgcgcgacatatggttcgccacgcaggcggatcggctgctgcagaaaatcgacgccgacgatatggagtttcacgcgcaggcgctgctggcggtgctggaggaggtctatccggatcgtcgcaagcccgcgctgctggcgcttgcgaggctcgtcatgcagctcctggcagcggcggtcagatatgccgccgcgttgagcgaggacgagggacgggcagcaatcgcgctctacaagaagatgctgcccgccgatatcggcgaattgatagcggagtgatcaggcacggatcttcgcgtccctgaccgacagggcgaccgccgagcgaaccgtgttgcggccaccgttcttggcggcataaagctcccggtccgccgccatcagcatggatttcagcgtttcgctggcggggtcgccgcgatagacgccgaagcttgccgtgacgcgcttggccggcagcgggccgacggccttgctttcgaactgcaggcgcagcctgttggcgatgccgaccgcgacatcgatatcggtccgcggcaggaccaggcagaactcctcgccgccgatgcgggccgcgatgtcataggggcgcatgttgtgctggatcgtggcgccggccatcaccagcacctggtcgccgacgtcgtggccgaactggtcgttgatcgacttgaagtgatcgagatcgaagaccacgacggagatcggcgtgcgctcgcgcgcggcgcgggcaatctccagcgctccgatatccttcagccagcggcggttgccgaggccggtcaggacgtcggtggtcgcctgccggcgcaactgtgccagcgtcgcgtccagttccttgatcaggatcgagatcccgttggtcacgatcccgacctcgtccttgcgctggctgcggaccgacttcacgacgccggtggagcggtaggtttcgaccacgcccgcgatctggtgcaacggccggatgaatgcccagacgcatgccaggcaaaaggccgtgccgatcagcgtcgccgccagcacgaggatcaggacgggcatagcctcgctgcgaaagccggtgaccagatagacgacgagcgccagaagcggcacgtgcgtcgagacaaagcaaatggaaaagatcttgagggtcagcgattggttgaactgctggaacggtgtgaacctcgtcaggcgcattctggactccttcatggtgtctttgggcgctcggaaaatggctggggaagtttcaccctgttgttaatgaaatcattcaaatttgaatgtcttcggggtcctcgggcatcgtgctccatgcaaatgcctgccgaacaatacgtatgatgaatgtctaaaattatgaacaggttgtggaaatttaagttgtccgcaacggaaataccagcgatggttttcatcgcgcagcacgcctcgcgcaaacggtgaaatggccgtgctgcgacgcaccgttcgggcggcgaaattaacagagcgagaagcggtctcaataacaacgcaggcgcgtgcaattgccattcttgcctttgagcctcgcgcgttctggaaacttgccccacttgctgctattggcccataagtttgagcacaagatcgaggcaaggagagaacgatgatccaggcaacattcacagaccgcaaagtcatggccgaactggtggccaagatgctctgggagatcaaggccgttcacttcaatgccacccagccctacaagttcgcctccggcatggcgagccccgtctatatcgactgccgcaagcttctctccttcccgcgcatccgctcgacggtgatggacttcgccgccagcgtcgtgttgcgcgaggcgggcttcgagaagttcgattgcatcgccggcggcgaaaccgcgggcatcccctttgccgctcttctggccgatcgcctcggcctgccaatgatctatgtccgcaagcagccgaagggccacggccgcaacgcccagatcgaaggcaacatgcccgagggttcgcgcgttctcgtcatcgaggacctgacgacggcgggtggcagcatgttcaagttcatcgacgcggtgcgcgcagctggcggcattgtcgatcatggcatcgcgctcttctactacggcatcttcgatgagggcgcgctgcgcttcgccgatggcaaggtcaagctgcactacatcgccacctggcgcgatgttctcgccgtcgccaaggagcagcagctgtttgatcagaacacgttgaacgaggtggaatccttcctcgacgcgccgctcgcatggtccggccgcaacggcggtatttcatcactttgagtgaataattgctcacgccgctttgcttttgccacgaagttatctaatccaattgagcatcgacggatcgtaatgcccttgggagacggacatgattttgtgctgtggagaagcgttgatcgacatgctgccgcgggagacgacgctcggcgaaaagggcttcgcgccctatgccggcggcgccatcttcaacacggcgatcgcgctcgggcgcctgggcatcccgacttccttcttcaccggtctcgccgacgacatgatgggcgaaatcctgcaggagacgctgaaggcgagcaatgtcgacttcagcctctgcgccatcgcgcagcgcccgtcgacgctcgccttcgtcaagctggtcaacggccaggcgacctacgccttctatgacgaaggcaccgccggccgcatgatcaccaccgacgacctgcccgtcctcggcgacgattgcgaggcgctgcacttcggcgccatcagcctgatccccagcccttgcggcgagacctacgaggcgctgctcgaccgcgaggccgccaagcgcgtcatctcgctcgatccgaacatccgccccggcttcatcaaggacaagcaggcgcacatggcgcgcatcaagcgcatggctgccaagtccgacatcctgaaattctccgacgaggacctggagtggttcggcatggacggcaaccatgacgatctcgccgcccactggctgcagcacggcgccaagctcgtcgtcatcaccaagggcgccgagggcgcgacgggctacaccagcgaacgcaaggtcaccgtccccagccagcgcgtcaccgtggccgacaccgtcggtgccggcgatacgttcgatgccggcgttctcgcctcgctgaagatggatggcctgctcaccaaggtgcaggtcgcctcgctcgatgagaaggcgctgcagaacgcgcttgcgctcggcgccaaggccgccgccgtcacggtctcccgcgccggcgccaacccgccatgggccaacgagatcggcctctaagcctcacggcagccgatcgagaaacgcgagcacggtccgattgaactcatcgggccgctgcagcggcgcgaagtggctgacgccctccagcggaatgaaggttgcgccgggaatgctgcgcacgagatgggcggcatgctccggcttgatgaactcgtccttgtcgccgagcaccaccgttaccggcacacgcatgcggttcaggtctgcggccgaataattcggctcggtcgacatcatcaggctcacatcctcgacgaaacggtcgaactgatccggcgtcggcgagagcgcctcgtaatccatccgatgcctgttgaagcagcggtcgatgacaggtgtcggcacgaagggctttacgcccgatgggtccatgctgcaggcgaagaagaacacgccgtcgacacgatcaggatgctggtcggccaggatcagcgccgtgcaagccccatcgctccagccgacaagcgctgccttctcgatctccagatgatccatcaccgcaagcacgtccgatgccatcagctcgtaggtatagggcttgccgtcccgcgtgctgcggccatgaccgcggctgtcgatcaccaccacgcgccggcctgatcgcaacagcgccggcacctgatagccccagttgccgctgttcccgagcccgccatgcagcaggatgacaggaggcccggagccatacgcgctgtaccagatatcggcgccatcatgcgtgaccacgccatcgtcgccatcaggcaaggcctccgcgccctgcgccgcaaatcgctccagctcgtcgtcgatcatatcgatcctcccaatccttcattctctctagacggatgacgcggccccatctcgacacctccaccgaaattatcgtcgcgccgaccagactaagccttatcccgcgccgctttcatggcctcgcgcagcacctcgtaaaccctcggatcttccgtctgcgaaacattgaaccgcatgaaatcggtcgccgtctgcgacaggctgaacgcattgcccggcgccagcaccacgtcccgctccagtgcggcgcgcgccacatcggcggcgtcgatgccatctggcagtcggcaccatagaaacatccccgcctgcggctcgagccagggcacgatgccgaggttcttgagcttgcccgagacgtcgaacatcgtcttcgacagccggctacgcagcgtctcgatatgcttgcggtagctgccgtcgctgagcacgctcaacaccagctgcgccgcatgccgcccgccgccgaacgaggtggcgatcttcagatccgtcagcccgccgatccagtccggcttggcggcgatgaagccgcagcgcgccgaggccgacagcgtcttcgagaaactgccgatatggacgacgcgatcgagcccgtcgaaggcggcgagccgtggcgccgtcacgtgctcgaaatcggtgaagatgtcgtcctcgatgattgtcaggtcgaactgctcggcaatcttcagcacccgatgcgcggttaccggcgagagaatcgcgccggtcgggttatgcagcgccgaattggtcacgtagagcttcggccggtgctcggccaccacgcgggcgaagacctcgacatcggggccggagggcgtgtagggcacgctgacgatcctggcgcggtgggcgcgcagcagggcgtggaaattgaaatagcagggatcgtccaccatcaccgtgtcgcccggctcgataaggaagcggcagagcaggtcgatcgcctggatgcctgactccgtaaggatgatctggtcgggcgaggcgccgatccccttgtcggccatccgccgcgcgatcagctgcctgagcggcggcaatccgagcggcgatccgtaggcaagcagcaccggtccgtcggctcgcgccagcgcccgcacggcgcggcgaacgccatcctccggaagccaggccggcggcagccagccgcaacccggcttcagcccaatatcgcccgcctccagagactggcgcgacacccagaacggatcgatctcccggtcgagccttggcccgacctccgacagtgcgaagggggccgcctggttggcgacatagaagccggagcccggccgcgacaggatcgcgccctcggcaaccagccgctcataggcttcgacgaccgtcgaggtggagatcttcagcgatcccgcgagcgcccgcaccgaaggcagtttcgcccccgccgtcaggctgcggccggcgatgcgctgcctgatcgtgttcatcaccatcgccacgcgggtagtgccaacgactacgttatcggccatccgtactgctctccgatgcataacagtttggcgaaaccgtaccataccgtaactggcatggccacgctgctagggaccataagatggctattgatcgtgaaggagtgtgccatggaccgcacggcggccggttggttgaatggttttatcggtgttctgatcttcagcggctcgctgcccgcgacgcgcatggcggtgatggggttcgatcccgtctttcttaccgttgcccgcgcggcgatcgccgggctgatcgcgctggcattgctcgcgctgtttcgcgaaaggcggccgtcgctgagcgacctcccgtcgcttgttatcgtcgccttcggtgtcgtcatcggcttcccgttgctgaccgcgctggcgctcacccgcgtcacctcggcgcactccatcgtcttcatcggcctgctgccgctctcgaccgcgatcttcggcgtcatcaggggtggcgagcgtccgcatccggccttctggatcttctcctgcctcggcagcgcgctggtcgcgggtttcgccctgtcgcaaggcgtaaccgctgccccgctcggcgatctcctgatgctggccgccatcatcgcctgcgggctcggctatgccgagggcgccaagctgtcgcgccggctcggcggctggcaggtcatctcctgggcgctggttgtctcgctgcccgtcatgctcgctctcgcgctcgtcaatctgccgccgtccttctcggtgatcgctgcgcccgcctgggcgggtctcgcctatgtctcgctgttcagcatgctgatcggcttcttcttctggtatcgcggcctcgcgcaaggcggcatcgccggtgtcgggcagctgcagctgctgcagcccttcttcggcctgctcttggcggcaacgctgctgcgtgagcaggtcagccccgtcatgctcgtcgtcaccgtcgccatcgtcggctgtgttgccggcgccaagaagttcgctcgttagagcgttgcaggtgagaatggatttgcattttgccgcgtaagcgcgcctgctgattgcgccgcatcgctcggtgtggcgcaatcagggagcttgaaatggcaaagggtcaaatccgtagcacgcgtgaagcgcgcaagccgaagaaggacaagtccgctcctgcagtcgcctcgcagcccggctcgcaggtcaagcaggccgcgagcaccgtaccatcaggcaagggcgccaggccctgaccgccatcaaggggtggtcctgaggcagtcatatcgcccaaatagaaaacgctcccgcggcggtcaccacgggagcgtctgttgaacgttgcgttcgttacttcgcgagcttcgccagctcggcgacgaggccctgcgtcgaggagtcgtggccggcagcactttccttgccttcgatgacgggcagcaggcccgtcgccagttccttgccgagctcgacgccccactggtcgaacgagttgatgcggaacagcacgccttcgacgaagacgcggtgttcatagagcgccacgaggcggccaaaggcgaacggcgtcagcttgtcgtagacgaaggtgatcgacgggcggttgccggtgaagacgcggtgcggcgcgatgaaatcggcctgcttgtcgtccatgcccttgtcggtcagctgcttcttggcttcctcgaaggtgcggcccttcatcagcgcttccgactgcgcgatgcagtttgccatcaggagctgatgctggtggcgcagttccggctcgaagccgttggcggcgatcatgaactcggccgggatcacgctcgtgccctggtggatcagctggtagaaggcgtgctggccgttggtgccgggctcgccccagacgacggggccggaattgccctctaccggcgtgccgtcgatggtgacgcccttgccgttcgattccatgtcgagctgctgcagataggcggggaagcgcgacaggcgctggtcgtaaggcaggatcgcgcgggtggcgtagccgagaacgttgcgattgtagaagccgatcaggccgagcaggatcggcaggttcttggcgatcggcgcggtgcggaagtggttgtcgatcgaatgcgcgccatcgaggaacttgccgaagttctcggggccaacggcgatcatcagcggcaggccgatggccgaccagatcgagtagcggccgccgacccaatcccagaagccgaacacgcgctcgctctcgatgccgaaggcggcaaccttgtcgagcgcggtcgatacggccgcgaagtgatgctggacggcggcttcgccgagcgcatcggcgatgaacttgcgcgccgtctgggcgttcgtcatcgtctcgatggtggtgaaggtcttggacgcgacgatgaagagcgtcgtttccggctgcaccagcttcaggatgtcggcgatatgggcgccatcgatgttagagacgaagtgcgcgcgcgggccgtcatgataaggcgccagcgccagcgtcgccatcacggggccgaggtcggagccgccgatgccgatgttgatgacgtcggtgatcgccttgccggtagcacccctcagcgcgcccgagcggatgccgtcggcgaatttgcccatggcggcgagcacgccgttgacgtcaggcatcacgtccttgccgtcgacgagaaccggggtgttcgagcggttgcgaagggccgtgtgcagcacggcgcggttttcggtgaagttgatcgccttgcccgagaacatctcgtcgcgcttggcctcgacgccgccggtctcggcgagcttgaccagaagggccagcacttcgtcgttcactgccgtcttcgagaaatccatcaggaggtcgtcgagcgaggcggtgaaacgcgaaaagcgtttcggatcggccgcgaaggcagcacggatatcggtggccttggtggcagccgcggtgcttttcagttggtcgacgatggcattcatgggaggctcctttgcagggcgagagggtcgcggaaactattcgctttaccgggtgcaaatcaagttcaacgatcttcttaaacgcaaaaaagccacccgcgattgcggatggcttgcaattttcacgaaacattcaaatcagttacgcagatccttgcgcaggatcttgccgaccggcgacttcggcagttcggtgcggaactcgataaagcgcggccgcttgtagttggtgaggttggccacgcaatgcgccttcacatccgcctcggtcaggtcaggatccttgcgcaccacgaacagcttcaccgcctcgccggaatgcccatcggccacgccaacggcggcggcttccaggatgcccgggtgcatcgccgccacttcctcgatctcgttcgggtagacgttgaagccggagacgaggatcatgtccttcttgcggtcgacgatcttggtgtagccgcgggcatccatgaagcccatgtcgccggtgcggaaatagccgtcgggggtcatggcgcgcgccgtctcttccggtttgttccagtatccggccatcacctgcggtccgcgaatgcagatctcgccaatctcgccgagtggcagcgacgcgtcgtcctcgttgcggatgtcgagatcggtggaggagatcggcagaccgatcgagcctgtgaattcgggcgaatcgaagcggttggcggtggcgacgggtgatgtctcggaaaggccgtatccctcggtaatatgcgatcccgtgatcgtaagccagcgctccgccaccggccgttgcacggccatgccgccgccgagcgaaatcaccagcgaggagaagtcgaccttggcgaattccggattgttcatcagcgcgttgaacagcgtgttgagccctgggaagacatggacgttcgatttggagaattcgcgcaccagggcggggatgtcgcgcggattggcgacaagaatgttatgggcgccaagcgacatgcccatcagcgaattcaccgtcagcgcgaagatatggtagagcggcagcgcgcagaggaagttcagcacatccggccgctggcgcttctcgaaggcggatttcagccagagttccagctgcagcttgttcgacaacaggttcttgtgcgtgagcacggcgcccttggcgatccctgtcgtgccgccggtatattgcaggaaggcgatgtcgctgcccacaagtcccgatggcttcagcgtcgcgccgtcgccctcgccaagcacctgcttgaaagtcttgtgccgtgggatagaccatgcgggaacgagcttcttcaccttgcggacgagaagattgacgatcagccccttggcgccgagcatttcgccgagcgacgtgacaaccacatggcgcacatcggtatggccgagcacctgctggacggtgtgggcgaagttctccagaacgaagatcgccttggcgccggaatcgcgcagctggtgttccagttcgcgcggcgtatagagcgggttgacgttcaccaccacaagcccggcgcgcaggatgccatagacggcgatcgggttctgcagcacgttcggcatcatcaccgcgacgcggtcacccttctgcaggccgctcgcctgcagccatgccgcgatcttgcgcgtctggctttccagctggcgataggtgagcgtcttgcccatgctggaaaaggcgatgcggtcggcataacgcgcgcaggatttctcaagcaactccgccagtgattcgtattccagcgccggaagctcggccggtacgatcgccggataggtggcaagccacggcttgtcgggcttttcaccgccaggatgggcggaaatgctgttcatcgtgtctctctccctgtcgctgccggcggggcgcccgtcgaaactactggatgatcctccatcctccaatacggcagcttatgtcattgctcgaatggttcaagcaacatgaagctacaataaccttgacgtaaacgtcaatattgcgcagcccgccaaaattgcggatcaaattcgggaacaacgggcagcgggcgacgttttcaactcatacgcccggcacgaggagtagaggccaggcacgaggaaccaaccgaaagggagtagagacatgctgcaacaggacaacgacaagaccctccgtgacccgaacgtcaaggatacgcacacgctgatcgccagcgaccgcgtggaagggacccgtgtctacggcgccgatggcaagcacatcggctcgatcgaacgcctgatcctcggcaagagagatggccgcgtcgcctatgcggtgctgagcttcggcggcttcatgggcatcggccacgatcactatccgctgccctgggaaaagctgtcctacgatacgcagctggatggctaccgcatcgacctgaccaaggaacagatcgaaggcgcgccaagctacgcggatgatgacgacacctggtacaacgacaacggccgccgcgtctatgactactacggcgtgccgccctactggatgtaggtctcccgcgaggccggaacggaagggtcccgccgcgtgcgggacccaccgacggccacaaaaacctccggcgaaagtcggaggtttttgcatgaattgcgccggtctatctcaaccagctgaaacgagatcgttggccgagcgcagcaccgtccccaccacgatatcggccacaccgatcgtcgcccgcgtcttgacctcgaacacatgcgtctcgcccggcagaagcgtgatcagcatcgtgtccaccaccgcatccggatcgagccgatcggccatcaggcagagatccttcagcaggctgaacgcagtcaccgcgaccgcgtaaccgccctcccgcttgctgacctcgatcctcctctccggcttcggcagcttgaggtcgatatcctcgacgaaatagtgaaatgcccgccggtccagcatgtcgacgacgaccatttcattgccgggatcgtcggcggtcgcgatatcctgaggtagcgtgaacgccttcgcctcgaagcggtcgcagagcagccgccagaattcgaactccgcaagcacggtcccatcaaaccgcaaccgcttgcctgagatcttcgcccgccagaatagcgtccgctcgttgacggcaacggccgcaagcccgccttcgcgcggctggatcgtcagaagcctgggatcgaaagcctgccgcatcgcataccacagcggcttgcgccgtccggccgaatccagcgccgcccaggaggtcaccggccagcagtcgttgaactgccagacaacggcgcccttgcagatatcgcggtgcgaacgcatgtgctcgacggcaaagcggatggcgcgagcctggttcagctgcgtggcgaaatgccagtcgttcatcgtccgcggctcgggcaggtggccggtcagcccacggatgagcttgtcgttgccctgcgtcgccttctggtgatggaagacgccgttggacaccggcgtcagcggcgcgtcgtgaacgctctcttccagcgtcgcccagttgggcggcgcctgccagccgaactcggagcagaagcgcgggatatagttgcggtagacctcgtagcccacgtcgttccacacatcccatatgtgcttgcacccatgcgcatcggcgttcggctcgatctccatcgtgccggaataggggctgccgggatagtaggggcggtcgggatcaatctcggcgcagagcttcggcaggatatcgagatagtagccgagcccccagctctcgccctccttgatgatcggccgccagccccactcgtcgaagccccagatattctcgttgttgccgttccagacgatcagcgagggatgcggcatcagccgcccgacgttgtcgcgcacttccgcctcgacctcgccacggagcggctcctcctcgggataggaggcgcaggcgaacaggaaatcctgccacaccagcatgcccacccggtcgcatttctcgtagaactcgtcccgctcgaagatgccgccgccccatacccgcaagaggttgatgttggcggccttcgcctcgtcgatccgcgaggcatagcgctctgccgtgacccgcgaggggaagcaatcgtcggggatccagttggcgccgcagagaaacagcggcacgtcgttgatcacgaaggtgaaggccgagccatgctcgtccggggaagtgtcgagccgcaccgagcggaagccgatctgtttggcgtaatcgtcgagcagttcatcgctctcgccgtcgcgcaattcgacatgcatcggataaagcggctgcgcgccgagatgatgcggccaccagatctgcggggagggaacgcgcacctggaagcggacctcgtcgcttccggcctcgacgatctcgctatgcgtgacgccgccgatgctcgccgtaatgcggcagtcgccggcgtcaccagcgcgcgcgatccttgcccgaaccgtgaccatcccgtctccaccggcaagcgttgccgaaaccagcgtttcggccagccgcgccttcgcccagcgctccagccgcaccggcttccagatacccgccgtcaccagcgtcggtccccagtcccagccgaaattgcaggccatcttgcgcatcaggttgccggggccgggatagttgttcggccggtagccataatgcgcttccatctccgcgccgtaagcgtaagccgagcggaaggtcacgaccagctcgttgccctcggccttcagacgatcggaaacgtcgaagcggtaggtgcggtgcatgttgaacgtctggccgatctcttcgccgttgagcgagatcgtcgccaccgtatccagcccgtcgaagacaagctcgtgcacgaaatcggcgtcgggcgatgcgtcgaagcggcagtgataggtccagtcctcgctgccgatccagtcattggtgatctcgttgacgtcgacatagggatcggggatcagccggcttgccagaaggtcaagatgcacgcatccgggcacatgcgccggcactgttttcggcaggttaggctttcctgcaacgttacagttgagggtccagccggtatgcaggtctgtcttggaaatcatcggggtctcttagagatagcggccgtggcgctgcaggacttcgatcttgtagccgtcgggatcggtgatgaagaagaacagggcaagcagcttgccgtcgcggttgagctcaacaagcttgccgggattgagcccggcttccgtcagccgcttgtgctcgacggcgacctcgtcgaccgacaccgccagatgcccatagccgtcgccgagattatagggttcaacgcggcccttgttgacggtcagttccagctcgaagccggtctcgcggttgctgagatagatcagcgtgaaggtgtcgaaatcgatgcggtcggcgacctcgagcccgaagaccttgccgtagaattcgaccgagcgcgcttcgttaagaacgcggatcatcgagtgaatcatcttggccaaggctgcctccatcgtgcgtatcaggccgctttggtagctgctggcttaggcggtgcgcaagcccattcttcgcgtcatcgcgctttccgccagtccgaccgcgtcatagatcaggagcgccattagcccgacgatcaggccgccctgcaggatgaaggcggtgttatccgatatcagcccggcgatgatcacttcgcccagccccttggccgccaccgtcgagccgatcgtcgccgtcccgatgttgatcacggtcgccactttcacgccctcgatgatcagcggcagcgccagcggcagctccacctggaacagccgctgcgtcgggttcatgcccatgccgtcggcggcgtcgagcacggcgggggagacctggcgcaggccagagatggtgttttcgaagatcggcagtagcccgtagagaaacagcgccaccagcgtcggcccggcgccgaagcccatggccggcaccgccagcgccagcaccgcgaccggcggaaaggtctgtccggcattggcgatggcgcgcgacagcggcaggaaatcggcgccgctccgccgcgtcacgaaaacgccgcccagaatggcgaccacggcgctcccgacaatcgagatcagcaccaattgcagatgcccgagcgccagaagcggcaggctgctttgcgtgtagacggcgggcgcgttgttcttggtgagcggcgtcagcaggaaggacagccactccgtccggaacaacaggatcaggagcagcgccagagccgcgacgcgaaagagattggcggtcaggagcttcattccttgcggcccagctccaggaggtgcgacatcgagatcgagccgatggccgccttcttctcgttttcgacggccgcctcgtcgatcccttgccagatcatctccgccagcgcgtcgcgcaggctgagcgattgcggcaggccgtggtcgagcccggccttggcgggcgccatgcccgatgtcagcggcagcagcgacatgcgcttcagcgcccggtccgtcgttcccgtcaactgttgcacgaaggggtcggcaggttcggttatgatcttctccggcgtcgaatattgcagcagcctgccgccgcgcatcaccgcgatccggttgccgaggtggaaggcctcgtccatgtcgtgcgtcaccagaatgatcgtcgtcccgaactgcttctggatcgccagaagatcgtcctgcgccttgccgcgaatgacgggatcgagcgcgccgaagggttcgtccatgatcagcacctccggccccgccgccagcgcccgcgcgacaccgacgcgctgctgctcgccgccggaaagctggtgcggatatttcctggcgaaggacttggggtcgagattgaagaggccgagcagttcatcgacgcgggcatcgatcctgccgcgctcccagccaagcagctgcggcaccgtcgcgatgttctgcgccaccgtgcggtgcggaaagagcccgttgccctggatgacgtagccgatattgcggcgcagctccgtctccggcacatcggccacgttgcgcccgccgacgcggatttcgcccgaggtcatcggcaccagccggttgatcatccggatcagcgtcgacttgccggaccccgaggttccgacgatgacggtgatctctcccttttcgaccgccatcgacacgttgtcgaccacggtcgtgtcgccgtagcgcttggtgacgttgcggatgtcgatcatgctcatgcggcaggttcccgtatgctgtcggcgaccgcatcgagaatgacggccgaggaaaaggcgaagatgacggtcggcacggcgccgagaagaacgaggtccatggccgtctggccaagcccctggaagatgaagacgccgaacccgccaccgccgatcagcgcggccaccgttaccagcccgatcgcctgcaccatcacgatgcggatacccgtgaggatgacgggcagcgccagcggcaaatcgatgccggtgaggatctggcggcgcgtcagtcccatcccggcggctgcgtcgcgcacggcggggtcgacgccctcgagaccgacgacggtgttggccacgatcggcagcagcgagtagagcaccagcgcgatcagggcgggtgccgcgccgatgccgctgatcccgatcgcggcagccagcggaacttgcgccgcgagatagccgagcggcagcatcagcaggccgaaaagcgccaggcttgggatcgtctggatcaggctcaacccctgcaagagcgcggcgcgaagcctgggcacccagaagcagacgatgccgagcggcaggccgatcaagaccgagatcgccagcgacccgaaggccagctcaacatgcgtccacgcctcggcccagaactggtcgccgcgattggcgaattcgcgcatgatcgacagactgtcgagcagccccgaccagagaaaaacaccgagcagacaggcgtaagcagcaagtgccgcgacccgcatccatgggcgcagccgcacctttaccagcgcatccgatatgatcagcgccgtcaccgcgagcagcacccagaagccgccgcccggcgtcatgcgcgccgccgcgctgcctgccggcgtaaacgacgtcgccacgaacccgatcgccgccagcaatgccgccagacagagcgtcgagatcgcaagccgcgcataggcgttttcgagaaacagcaccgcgcaggccgagagaacgaggagcagagtgaggatgatgacggcgggctggtccagaagctgcatcagcagcatcggcttgcccgatgcgatccggttcgccttcacgtagatgaatggcagcaatcccgccgcaacgacgcctgccgccacgagaacgacgccgagccggtccagtctgcggaccgctaaggtttcttccatcgatccatcccagcctggaaggaaaacggctccgcacccatggctggatacggagcgtcggcgattacttcaggaagcctttttccttcaggtaggcctcggcaacgcttttcgccggctcgccatcgacctggatcttgccgttcagcttgcgcagttcgtcggcggtcaggcttttgaagatcggcgccaggatctcttcgatcttcgggttcgccttcagcacctcctcgcggatgatcggcgtcggcgcatagacctgctgcacgctcttgtcgtcttcgagcacggtgagttctgctgcctcgatcgcgccatccgtgccgtagaccatggcggaatttgcgccgttcgtctggtcggcggcggccttgatcgtggcggcggtatcaccgcccgagagcacgatttcctgctccggcttcagcatgaagccataggtcgtctggaacgccggcagcgcgccggcggtgttgacgaattcggccgaagccaccagcttcgcctcgccgccaccggcgacccacttgccgaaatcggacatgctcttcaggttgttcttcccggcaatgtcgttgcgcacggcgatcgcccatgtgttgttggcgggcgagggcgtcagccagacgatcttgttggcgtcgtaatccagcttcttggccatgtcgtagccctgctggatgttcttccaggcggcatcgtcgggcttgttgaagaagaagccggcattgccggtgtattcgggatagatgtcgatttcgcctgcggtgatcgccttgcgcaccacgggcgtggcgccgagcgcgatgcggtccttcgtcttgatgccattggcgttgagcgccagcgcgatcacgttgccgagcagcgtgccctccgtgtcgatcttcgaagacaccacgacatccgccgcctgcactgcacctgccgtcagtgcgcagagcgataccgcaagggctattcttttcagcatgaccatccccttattccttgaaagcgcggcaagccttggcgcaaggcgaaccgctgtagactccccggcgaagacagctggctgtcggcgaccgatccaatgcttaactgacatagtgtgcacgattgaaaaatcgatgcgattgcgaaaatactgttcacgacactgtccaatcgatcaatgatcgattgccttccggtctccgctcgcaaatccaactctgcgatgctaaccggaagagcaggcttcggcttggacgatcatgaggtgacgagggaggaatgcgtgacgatcttgcttgaggtatgcgtggatagcccgcgcggtctggcggcggccatcgaaggcggcgccgatcgtatcgaactgtgctcggcgcttgaaatcggcgggctcacgcctgtcgccggcatgatgaaggcggccgccgccgcccccatccccgtctacgcgatgatccgcccgcacgccggccccttcgtgttcgacagcggcgacgaagcggcgatgatggcggatatcgatgccgtccgcgccttcggcctcgccggcgtggtcatcggggcaaaccgtgaggacggcacgctcgacatgccgctgctgcgccgcttgaaagcacacgccgccggcctcggctcgacgctgcaccgcgccttcgatctcgttcccgatcccgacgcggccttggagcaggccgtcgagctcggctgcgagcgcatcctcacttccggctgcattcccaaggccatcgatggcctggaaacattgacgcggctgtcgaggaaggcggccgggcggatatcgatcatgccgggcagcggcgtgcgccccgccaacgcgccgcagatcctgcgcgccaccggcgcccgcgaaattcacggctcctgcagctcgcctgtgagcaatgtcgatccccgcgcggtcgccttcggcttcgaggccgcgtcgcccaaccggacggacgcttcgatcgtacgccagatgcgcgaggcgatcgacagtctctaggcgattttgatgacggccttgatcaggccgctcttctcatgcgcccagcgcgccagatcgcgcggcgtatcggagagcgtcgtgcggtgggtgatcagccgatccaccggcacgaggccgttggcgatcgaggccgccacatgctcgaaatcgatccgcgtcgcgttgcggctgccgatcaccatcatctcgcgtttgtggaactcggggtccgagaagcggatatcgtccttcacgacgctgaccagaaccagcgcgccgccatgcgcgacgaactggaacgccttctccatcgatggtccatagcccgtcgcgtcgaaaacgacgtcgaagccgtcaccgccagtcttcgccttgaccgcatcaagcgtcgcatcgttggcgacgatacctgacgtaaatccgaagcgctcggcggccatctccagccgttccgcactggtgtcgagcaaggtcacgtcatggccggcgatccgcgaaaagattgcagcaccaaggccgatcggaccggcgccgatgaccagcgcgcgcgagccttcaggcgaaagcgagcggcgcacggcatgcgccccgatcgccaggaattccaccgtcgccgccgcctccaggctcagcccctgcgccgcatcgagattgcccgccggaaccgtgatctcctcgcagaacgccccatccgtgtgaacgccgagtaccttgatgtcggtgcaacaattcgccttgtccttgcggcaggcgacgcatcggccgcaggagatatacgggtttacgatcacgggcgtgccgaccgcgatctcgacgccggcgccggtttccaccacggtcgcggagatctcgtggcccatcacccgcggatattcgagaaacggatgcttgccctcgaagatgtggtagtcggtgccgcagatgccgacatggctgacggcgagtcgcgcccagcctggagccggcgtgccgggggaggggcgctcgacgatctcgagaacacccggttgttggcaaagcacggctttcatgacgggtcctgcattcgattgaaaggaagccggcggcaaggccggctccttatgttggcgttcaggagctgcggcgacggcgcagctggtcgaagtagacgatcacgataatcagcaggccggtgatgatgcgctgccagaacgaattgacgttgagcaggttcgcgccgttgttgatcgtggccaggatgaaggcgccgatcagcgggccatgcacggagccgaccgcgccgaacagcgaggtgccgccgatgaccgacgaggcgatcgcctgcagttcccagccgtccgcctgcgtggcgttgccgatggcgatacgcgaggcgagcaggacaccgacgaacgccgcgaaggtcgccgacaggatataggccatgtagatgatgccgttgaccctgacacccgacagacgcgccgcctcgcgattggagccgaccgcgaagagatagcgtccccagcggctgagatgcaggaagatgtaggacgggatcgcaaccagcacgaccatccagaacaggctcgggacgccgaggaagtcggcgcgggcgaagttcgtgaagggctcgttgacgatgttgatcgtcgaaccgttggtgatcagaagcccgatgccgcgcagcgacgtcagcgtcgccagcgtgatgatgaagggcggcaggcccatcttgacgatgccgaagccatgaaacaccccgatcccgacgccgatcaaaagcgtgatcaggatcgccgcccagacggggaagcccgcctgcagcagccatgccaggatgacggtacagaagccgacgatcgcgccgacggaaaggtcgatgccggcggtgatgatcacgaaggtctggccaagcgccaggatcgccgtcatcgcgccctggcgcagaagattggagatgttgagcggcgtccagaagctggcggtgacgatgccgagcaggatccacaggaaggccagaagaccgatcagggtcaggccgaacaggatgttgaccttgcggcgcggcggcggcgcggcgatctcggtgggggttacggtcatttttctctctccctcttgttcttttagacgccgatcgcttcgctcagcacttcttcatgcatggcggcgtggaagtcgtggctggccacgagctggccactgcggaacacatgcagccggtcggccagttcgtagacctcgggcaggtaggaggagatgagaatgatccccgcgccctgcttcagaagcttggcgaacagccggtagatttccgccttggtgccgacatcgacgccgacggtcggttcgtcgaagatgaagagccgcgccccatggctcagccacttgccgatgacgaccttctgctggttgccgccagacatcgctgacaccagcacccgacggctcggcgtcttgatcgccaggtcacggatctgctggtcggcgttcctgctttcctcgccgtggctgatgaccggtcccttgctcagccgcttgaagaccggcaggttgatgttgaggccgatcggcaggttgaggcagaggccctggtcgcggcggctttccggcgccagcgcgatgccgagctccatcgcggtgcgctcgtccttgatgttgaccttcttgcccatccagtggatttcaccggccgtggtcttttcgcgaccgtaaaggccgagcgcgaattcgctgcgtccggcgccgatcaggccgtagaggccgacgatctgtcctgccttcaccgaaagcgacacgttctcgaagcccggcccggacaagccacgaacgtcgacgatggtctcgccgatcgcaatctcttccttgtgatagatctgctcgatcgagcggttgatcatcagcgcgatcagctcgttctcgttggtttcgccgatattgcgcgttcccacatgggtgccgtcgcgcagcaccgagacgcggtccgccagctcgaagacttcttccatgcggtggctgatatagacgatcgtcacgccttcgttctgcaggcggcggatgagcttgaagagctgggccgattcctggcgcgtcagataggcggtcggctcgtcgaagatcaggaactgcgtgccgcgcatggcggcgcgggcggtcgcgaccagctgctgctggccgatcgtcagatcgctcaagggcacgccggccggcaggccgaagccgagatcgttgaggacggcctgcgccatcttctccatctcccgcttgcgcatcagaccgtattgattgacctcgtcgccgaggaagagattggccgccaccgtcaggtgcgggcagagaacgacttcctggtgcacggcgttgatgccgcgcgcgatcgcctcgttgggcgtcgccagcgcgaccgggcgtccgcaccagagcacttcgcccgccgtacgggtgatgacgccggtcagaagcttgatcagcgtcgacttgccggcgccgttttcgccgacgatcgcgtggatctcgccggccaggaaagtgatcgtcgccggtttcagcgcctgcacatatccgtaattcttctgcaatcccttgagttcgaggatcggggcacccgcgggtacgcggtccgcctccttcggcttggcgctgtcatcgtggcgatgactgacctcttccaggctcatgtgcgtttcctcctcgcgaattgccatgccgtccttcgccgtccgctcctccctaggagttcggctgaagggaagaaaggccgcgcgggatcgctcccgcacggccatcgtcagttcgttacttgaccttcgggttcaggagagcgtcgatcttcgggtcactcatattggccttggtgacgaggttggcgccggtatcgaccttctcctcgaccttttcgcccttggacacggcaagcgcggtcttcacgccatcatagcccatgcgataggggtcctgcacgacgaggccagccagcgagccgtccttgaggaagccgaccgtcttgtcgtcgctgtcgaaggcgatgaccttgatcttgtcgccgagcttgttttcggcgatcgcctggccgacgccctggccgaggatgaggttcgaggcgaacgcacccacgaggttcgggttggcggtgatcaggtcggtcatcatgttgaggccggttgtcgcctggccgtcaccgtacttgtcggcgatgaccttgaggcccgggtacttggtcttcacctggtccaggaagccttcgcggcgctgttccagcgagccgacgcccggcaggttggtgaggatgacgacttcgccttcttccttgccggtcatttccttgatcgccgccgccaggccatcggctgcgatgcggccgccctggacgttgtcggtggtgaggaacgacttgaaggccttcgaatccgcggccgagtcaatgccgatgatcggaacggacttggcggcttcgtcgatcggcttgccgagcgccttgaactcggtcggcgagatgacgatcgccgccggcttgccggcaacggcgttctcgagaatgctgatctggccgttcacgtcggattctgcctgtgcgccaagctcaggaacgttgacgccgagatccttgccagcggcgcgggcgccggcaagcacgatctgccagtagaaggacgtggtgtccttgacgatgatcggaatggtcacgtccgccgcgaaggacggcatcggcatggccgttgccatgacggctgcgcccgccatggcggtaaaggcgcgacgcgaaagaatggacttcatgcgcatgttggttctcctctcaggtgcgttctcctccaggaaatctctcgtgaacgcgaacgagagacttttatcgataaaaaacatttccgagttcgaagctagccgaggcctgccctgattgcaagtctgtgtgggataagccctttggctctttccgccccggtacctgcccccggtctccgaccgagcagccgacgtcaaagcgccggcaactcgttcttccataccctccggccttttccatccagggccggatgtctctccaggacatccagcccgcaaggccgtcgcgttcgatttatgaaatataggttccgcgtgaatgtcaatacggaacgtttattccgtttctatccttatccccagaatacctcgtccggcagcaccacgcccttcttcaggatcaggttgccataaagccggaactcggtggtcgcgacgatataggcggccttgcgcgaccgttcgtaaaaggcgaaacgctcgagcgtcgaaatcgagaaatcgcccgcgcgcttggacacgatggtctgaaattccttgcagacctcgggcaccgcggtcggatcgcccaccacttccatgacccaggccgattccggcacgaacgtatcgagcggcatgtggctgagaatggcttccgccatggcggtcgcgctgacgccgtcggcgcggatcatttccgggcccatggaaaaggacgggaagttggcatcggcgatgacgatctcgtctccatggcccatgcgcgcgatggcgcacaggagatcggggctgagaacggggtgaattcctttgagcattctgttctttccttaaacgcggacagcgtcgtcgccgagcggcggcgcaacgagcgtgaagctatcgaattccggatagatcgtctccggcaaaatcggtgagaagagctccatgttgcgcgtcacgctggatgccttgccggtgccgatcagcaccgacgagacaacaggatcgcgcagcgcgaactgcagcgccggcgcggcgagcgacacaccgttcttcttggcgacttcttccatgccgcgcaccttggccagcacctcttccgtcgccggcatgtagtcgaagttcgaccccgcgaccgcaccggtcgcgagaatgccggagttgaagacgccgccgaccacaagcgacgtacccttcttgcggcagagcggcagcagctcggcttcggccgagcggtcgagcagcgtgtagcgccccgccatcaggatgcagtcgatatcggcattgcgcatgacgtcgaggcagacgggcacttcattgacaccgagcccgaaggccttgatcgcgcccgtcttcttcagtgcctccagcgccttgatgccggtatcgaggaattgcttgagatagacggcgttcttcgcggcgccatgcgtatagccgccgatatcgtgaacatagaggatatcgatgcggttcagccccagccgggcgtagctgaattcgaccgagcgcatgatgccgtcataggaatagtcgtaatcggcatcgaaggagagcggatcgacgtaagagtagtcgggaaccgtccccgtcggcaccggtctgagcagccgcccgaccttgcttgacagcacccattcgctttccggcttgccgcgcagaaaatcgccgacatggcgctcgccgagacccagtccgtaccagggcgccacgtcgaaatagcggatgccgctatcccaggcggcgtcgagcgtctgcattgcctgctcgcgcgggcaggcgcggtagaggccgccaagtgccgcggcgccgaagcttacttcggtcacctcgagctcggtccggccgatcctcctcgtcttcatcattcctccctgaagactgtgtccaatattgattagagcgtcgctccgagatgccaaggcacgaattcgttatcgccgtagccgaactcctcgctcttggtcttcctgccggatgccgtatcgatgatcaggtcgaagatctcgcgccccttgcccgagatcgtcgcatcgccgctggcgatcgtgccgcagtcgatgtccatgtcctcttccatcgaggcatagagcgccgaattgctggagagcttgatcgacggtgccggccgacagccgaagcagctgccccgcccggtggtgaatgcgatcatgttggcgccgccggcgacctggccggtggccgagacagggtcgtagccgggtgtgtccatgaagacgagcccgggtgccgtcacccgttcggcataaccgtagaccgccgtcagcggcgaacgcccgcccttggcgacggccccgagcgacttttccaggatggtcgtcagcccgccgcgcttgttgccgggggaggggttgttgtcgagcgaggcgccgtgcatcgccacgtatttctcccaccagacgatcttctcgtcgagcttgcgagcgacttcctcgctgaccgcgcggctgcgaagcaagtgctcggcgccgtagatctcggaggtctccgacaggatcgccgtgccgccggcagccgccagaaggtcggccgcgacaccgagcgccggattggcggttatccccgagaagccgtcggacccgccgcactgcatgccgatgatgatgtcgctgatcggcagcggcacgcggcgctcgcgcccgacatcgtcggcgatctccttcagcatgcccatggcgcgctcgacggcgcggcgcgatccgccggcatcctgaatgttgaaatggcgcttggaattgccggcgccgctctggccgtagagcgtcagctggttgacctcgcagccgagcccgatcatcagcacgccgccgaaattcacatgcctggtatagccggcaagtgtcctgtgcagcacggccatgccgtcgccggtcgagctcatgccgcagccctggtcgtggacgataggcacgaagccgtcgatgccctcgtaatgcggcaggatggtgcggttggcctgatcggcgatggcgcgacagaccgtggtggaacagttcacgctggcgatgatgccgatatagttgcgcgtcgccgaacgtccgtcggcgcgcttgtagcccatgaaggtgcgcgcccggtcggccgcactcgcttcttccggcgccgaattggcggtggcggccaggcggtcgttttcgaaatgcaggttctggctatggatgtgctggccggccttgacgtcagcggtcgtgcgtccgatcgcctgcccgtatttcacgaccggctgaccgagcgcgatatcttcgagcgcgatcttgtggccggggtcgatcttatcgagcgtcgtcacccccgcaaccgtctcgccggcggcgatcggggccgtggccacagcgacattgtcgcctgatgacaggataatccaagggtctttcttcaacgatcttctccctagggaaacactcgctgcatcggcgaatgcgcattgcttttgttttttatctacaataaacattttcaagtcaacgggattattgatcctgtggacgagggaggcaaacagccgcggacgatccaaaataagataaggatcgccgagagataagctcctgccatgcgccggcgcccgccaccgcgggccctcgccgcgtgcggcggggcaacgaggcggggtgtgcatggcacggcagaacacggtcttcaaggaagcgtataatcgctatgccgcggcgctgcgcgccgacgagaccctgccctccgagcccgacatcgccgccaagctcggcatcagccgcagcaccgcccgcgccatcctgacccgcctcgacgaagagggtatcatccgctggaacaagcgccagaaggtggtgctgcgcacaccgacccaggccgatctctttccctcggaagagaccgattccctgcacaacatcatcgagcgcagcttcatgcagcgcatcctgtcggatgatgcggcccccggcacgcagatcaacgagctggagcttgcccgcgaaatcggcaccggcaccaccagcgtgcgcgaattcctcatccgcttctcgcggttcgggctgatcgagaagcggccgaacagccactggatattaaagggtttcacacgcgaattcgcgctggaacttgccgaggtgcgcgagatgttcgagctgcactccgccgccgaattcggccggctgcctgaggagaacgaggcctggcgggcgctggcggagatcaaggccgaacaccacgccatgctggatgatctcgaccgccgctacaaggaattctcagccctcgacgagcgcttccatttgttgatccacggtgcggcgaagaaccgcttcatcgccgatttctacgacgccatcgccatcgtcttccactatcactaccagtggaacaaggccttcgcgcgcgagcgcaacgagcgcgccatccacgaacatctggattatatcgcagcccttgaaaccggcgatcccgccgcgatcgacgccgcctgcagggtgcatctgcgctccgcgcgccagaccttgctgcaatccctgccgcagagccttggggacggggaaacgctcgcgaaataaggccgaacggcatcgtacgggcgaaaaaaagcccgctcaaggcgggccacgtctcgcgaactcaatacaatcgataacgcaataccaacgagacaacgaacggtaccatcccggatgccgtcttgcacttcgctcattcggatgatccacgaacggcggacccaggcgattgaagcaggcacggcttacggcgtcacgcatcttcggctgatcgaaggaagccggttggggacgccctagcgccgggggaaatcattccatccggaagcgcgggccttggcgaaaacgatctgcacttcacgccccagatagagcagggcgaagatgcccaatatcgtcaggatatcccacatgtgcccttaccctcgttgcgttgcgggccgtgcctcagacccctcatgacacggcccgcccaatccaaacgcgaccgccatcacgttttaggacgatcgcactcatatgcgacatcaatgcgtcgcggtatcgcgaattctgaggatgtggccgtttggcgcatcaaaatatgttcaagttcggttgaaccgatgtcgccgtggcgcagggaggctgcacccaaagaccaacttgcctcgggcgatgcaaccaatgaggatcaaccccgaacagtgtttggccacacaagctcggggaacaggagtgatccaggaattcagctggcgcccgggtatcggagatcccaccgtcgttggatggttcaccgtcgccctctatctgctcgccggcgtcacctgctggcggaccgcgggatttgcggggtcaagacatctgccgggaagtacggaagcggccacgtggcgtatgatctcggtggcgttcttctgccttgggatcaacaagcagctcgacctccagtctgctttcacgcagatcggccgcatgatcgcgcttgccggtggctggtacgaacagcgtcgaacggtgcagctttatttcattctcgcgatcgctgtcgtcgggatcgtggtaacctccgtcgttctctttcgcgtgaggcggtcgccgcgtgaactcatgctggcgctggcaggctcgatgcttgtattcggatatgtggtcattcgggccggatcgttccaacatgtcgatcgcttcatcggcagccgcgttctcgccttcaaatggaactggatcctggaagtggcgggcatattgatcgttatcacagccagcgagtggaggcgcgcgaccatcgcccggcaaagccaccgtcttgcgagcggattgcgacactagtggttgccgagctttaaagggatctgtcttggaaaaaatggtgccgcttgcaggactcgaacctgcgaccccatcattacgaatgatgtgctctaccacctgagctaaagcggcaatccggcgggtgatttgtgttcggcccgcgatttgcatggcgctgatacaagcattggccaaagatttcaagcgccctgtcacgtctttggcaaaaaagaacgtcgctgtggaaattacccggcgcggctcagaccggcgcgggcagcgccagccggccgcgggccgcgtcgtattcctttttcagtcgctccaccagcgccgcgacgggtttgacggccttgatggcgccgatcccctggccgctgccccagatgtccttccaggccttggcgccgcccacggcctgttcgaaatccatcttcgaggcgtcggccaccggcaggttgtcggggtcgaggcccacggccttgaccgacggcttcaggtagttaccggcgacgccggtgaaatagttggaatagacgatgtccgtggacgcaccgtcgacgatcgcctgcttgtaggcgtcggaggcgcgtgcctcctcggtggcgatgaaggggctgccgatataggccatgtcggcgcccatcgcctgcgccgccaggatcgcgccgccattggcgatcgcgccggccagcagaagcgggccgtcgaaccattcgcggatctcctgcaccagagcaaacggcgacaacgtgcctgcatggccgccggcgcccgccgccaccgcgatcagtccgtcggcgcccttgcggatggccgagttggcatggcggttgttgatcacgtcatgcagcacgatgccgccataggagtgcacggcggcgttcacctcgggaactgcgccgagcgaggagatgacgatcggcaccttgtatttgacgcagagcatcaggtcgtgctccagccgcttgttcgacgtgtggacgatctggttgaccgcaaacggtgcggctggcctgtcaggattggcggcgtcgtgcgctgcgaggtcctcggtcatcatcgcaagccattcgtcgagctggctctccggccgcgcgttgagcgccgggaatgcgccgatcacgccggccttgcactgcgccagcgtcagcgccggatgcgagattatgaacagcggggaggccaccacgggcagtctgaggttccgcgtcaggatcgggggcagggccatgggtcaccgtgaagaattgacgtttacgaaaacgtcaatgtgatagcagagagttttcgccaggaaaagaccgccgtcgcggttccgccaacatcggttgctctataaaaaggtctgcctttcggtattatcccctgttgaacggggggcgttggcagcctcagccttgcggtttgcggcatcagccgctaccgcagtggcatattgttaagcataatgacgcctgtcatcagaacgaaggaccggacgtgagcggattagaaacggctatcagaacggcgctagacaacgccgatcgcgacaatcccgaagtccgagccaagatctatcaatccgcgcgccaggcgctggaggccggtctgcgcaagcaggacgtcaccgataccaacgcaatcgcgcatcatcgccaccgcctggaaacgacgatccacatgatcgaggccgaggagcggcagcgccttcatccgcgccaggggccgccggaggtgccggtgccgccggtcgtcgatcttccgcccccgccggctccgcgcgcccgcgaggatttcgacagcccctcgatcggtggcgaaacgcgcgcgcccgaggtcatggttgccgatcatcgccacgatgacgattccggcctcgccggcctgcacgccggaaatgcggatcatctgtccgccgcgcccgaacccctggcggccgaaaaaaagccggccggcatggatttccgcccggaacgtgcggtttcccggcgcaagccgcgaaagttcttctcacggctgctcgtctggtgcgtcttgctcgcctttatcggcatgggcgcctggtgggtgcagacctccggccttttgatgaccgccgccgagcgtgataccagcgtcgccaatccgcccgccaccaccgcgccggaggatttcaacggtaccagcgcggatgacggccatagcgccgatagcgacgcggcgcctgccatcgatccgcagaactccttctccgccgcctggctcgagatcttcaagccctccgatacgaacaaggtcgtcaagggtgcgcaggcgcgtgtcgaaaacgtcgcggaaaacgatggtccggcactccgcctgacgtcgcaagccccgggcgccgacggcaatgtcgggatcagcgttccccccgacatcctgcagcagctcgcgggcaagtcctcgacgatcgccattaccctgcagtcgacctccgacgagccgacgcagatcaccgtcgaatgcgacttccagtcgctcggcgattgcgcccgtcaccgcttcacgatcaacagggagaagtcggacgtgctgctgcaggtccggttcgatcgatcgctggcgccgacctccgccggcaacctgctgatcaacagcgacgtggatggcaaggcgaggggcatcaacctctacgccgtgcgcattctgcccggccagtaacgcgctccggtgacgcgcttgggtgcgatcacgccaggaacttcggtccctggccgatgatcttgtcgtcgagcttgccgatcgcgtccttgtccttgccgtcatagtcgatcgttttcagcatgtggcggataaggttcagccgggcgcggcgcttgtcgttggcgtgcacgacggtccagggcgcgaattccgtatgcgtctgcttgagcatccggtcgcgtttttcgctgtactcgtcccatttcgtcagcgcagctatatccatcgacgacagcttccacacctttcgcggatcatggcggcggtcgtgaaaccgcttgagctgcatctcgcggccgatatccaggtagaacttgaagaagaagatgccctcgtggctgatcaccttctcgatctgcggtgcctgcgcgagaaagtcctcatattgcttttgcgtgcagaagcccatgatcggctcgacgccggcgcggttgtaccaggaacggtcgaacagcacgaattcgccggccgtcggaaactgcgcgatgtagcgctggaaataccattgcccggcctcgcggtcggtaggcttcgtcagcgccacgacgcgggcaaggcgggggttcatgtgcgcggaagaggcggagatcgcgccgcccttgccggccgcgtcgcggccctcgaacagcgccatgacgcgctttccggtcgcctgcagccagaactgtactttcaccagttcgacctgaagcgccttcagctcttcgagatactcatcttccttgagcttcttgttgtaggggaagtcgcccgatttcagcgcttcctcgtcgacccagtcgggcagaacggggtcatccacgtcgaagacgcgcttcttgccgcgaatttccagttcgactgccctgctttcgacttcctgcgccatgacgatcctcctcggtctgtgagtagcggccaaggcgaacatatttccttttgaaaatcaaacatcttggcgccggtaaaaattatgtgcgtagcctgggcgcttgtcggtttgctggcggcatcggtaaacttctgtcatgaaagagcgctatcaggcgaagtttgatagccaacgaagaacgaatcaacgtcgcgaggggcacttggaacagcaaacgccatggacggcaaaactgacggcgaagatccgtcgggagagcttcgtgcttcttgtcgcagtggcgatcgctttcatcgccgctaccgcgggcatgaacggatggggcgtgctcgggctgctggcgatcatgcttctcgctatcatgtgttcgtccgagccgcgcaaacagatcacgccggcgccaccggtgcccgaggtcgatgagccagcgcgcagcctcttgcccgaggtgtctgccacgctttccgcgcttgatatcccggtcatggtgctcgccggcgatgcctcggtgctgttccagaaccgcgccgccgaaaaggcgtttggcgaggtcgtcatcggggcgcatatctccgcgcgcctccgctcgccgagcattctcgacatggttcgcgaaacgatcgtcaccaatgccccgaaccagatcgagcactcggaacgcctgccgtccgagcgcgtctatattgtccgaagctcgccggtggagcttggcgccatcaatggtgtcgtcggtggatcaggcgaacgcctcttcgtcctgtccttccgcgatatatcggaggtccgccgcatcgaccgcatgcgctcggatttcgttgcgaacgccagccacgaattgcgcacgccgctcgcttcgctgcgcggcttcatcgaaacgatccagggcccggcaaaaagcgacctgaaggcgcaggaacgctttctcggcatcatgttcgaccagacgacgcgcatgagccggctggtcgacgacctcttgtcgctgtcgcgtctcgagctgaagtcacatatcgcgcccgatgagaaggtcgatctcgttccgctgctcggccatgtccgggatgcgcttctgccgcttgcaaacgatgtcggcgtcgatatccggctgcatctgccggaaggcagggcggaggtgctcggcgaccgcgacgagctcgtgcaggtatttgaaaacctgatcgagaacgcttgcaagtacggccaggaaggaaaggtcgtcgaggtcttcctcaacaatggtcccggcggaccggtcgaggtcaccgtcgtcgacaaggggccggggattccggctgagcatgttcctcgtctgacggagcgcttttaccgcgtcaacatcgaggacagccgttcaaagaagggcacggggctggggcttgccatcgtcaagcacatcctgacccgtcaccgtgcgcgcctgatcgtgaagtccgaggtcggcaagggaacgagctttacagtccgattttgacataaaagagcggtcttcgttcgtgaagtttagttttatctatgtatttcaagtgcatagactgtcataaatgtttcaccgaattgacataaaagctcttgtcatcaggggctaaagaatgcgtgccgctgacagagacggcaccgtcaggggccgttccaggccccacccagacagctataagcccgggagactattatgaacgcttttaaacttacggtcgccgcacttgctgcttccgccgctttcgcaggcgcggctgttgctcgcgaccaggtgcaggtcagtggttcgtccaccgttctgccttacgccaagatcgttgccgagagcttcggcgaaaccttcaaggacttcaagacgccggtcgttgaatccggcggcaccggcgctggcctcaaggaattctgcaagggcgtaggccctgacacgatcgatatcgccaacgcttcgcgtccgatcaacgccaaggaactggaagcctgcaaggctgccggcgtcaccgacgtccaggaagtcaagatcggctacgacggcatcgtcttcgcgaccgactcgtccaaccctgacgtcgcttacgagccggccgacctctacaaggctctcgctgcccaggttgttgtcgacggcaagctcgtcgcaaacccctacaagaagtggtcggaagtcaacccgaagctcccggctgttaatatcgctgcctacatccctggcgaaaagcacggcacccgcgaagtgttcgaactgaacgttctcgctgctggctgcaaggatagcggcgctctcgacgtgatctccaaggaaatcaccgacaaggctgcccagagcaaggcttgcgttgctgttcgcaaggacggcgctgcagtcgacatcgacggcgattatccggaaacgctggcacgcatcgctgccaacaagaccggcgttggcgtattcggcctctccttctacgaaaacaacgctgacaagctgaaggttgccaccgtgaagggcatcgttccgaccccggaaacgatcgctgacggcacctatccggtttcccgtccgctgttcttctacgtgaagaaggctcacctgggcgttatcccgggcctgaaggaatacgtgaacttcttcgtatccgaccagatggttggccctgacagcccgctcgtcgagtacggcctggttgctgctccggacgccgagcgcgaagcgacccgcaaggcagtcgaagacggcaagaccatgtaatcgactttgccggcgcgaaccgaagggttcgcgccggcactgcctttgtccgctctaagggggcggcgaagttgaactactccatgattggaagccgaaatggccgtgctggcatttcgctctttgggggccaagggcctgggggaccttaacgaatgagtacatccgtcttactcttgtgcctcgttgtgcttggcgccgttgccttcgtggcagcgcgcggccgcgcgacggcgcttgccggaggcaaatcctctgcgctgcattcccggcctggctactacggtgcctacgccgctatctgggctgtcctgcccgcgctgctcgtgctgtgcgcctggcttatcatcagcccatccatcatcgaatcctccgtccgtggcggcttccctgaagacgtcaaggccctgccggccgcccagcagaacctgaactacggcatggtcaacgccatcgcccgcggtctgccgctgctcgcgcaggaagacgtggctgccggcgtcggcgatcccgccggcctgcaggccaagctcgccgccaagggcgttccgctcgccggcgtgccgcagccttacatgatcgaaggcgcgcagacgctgaacgccgagagcggtgtgagccgcctgatcatgacgctggtcgttctggtgattgccgtcgccggcggcgcctatgcgctgcgcgaagtcgccccgcgtttccgtgcccgtaaccgcgtcgagcgcgttatgctctggggcctgttgcttgcgtcctccatcgccatcctgaccacggttggcatcgtcatgtcgatgctgacggaagcggccgccttcttctccgaggttccggccgccgagttcttcttcggcacggtctgggatccgcgcttcgccggcgccggcagttcgtccttcggtcagtttggcctcatcccgctgttgctcggcacgctctacatcggtttcgtcgccatgctcgtcgccgttccggtcggcctgttcgcggccatctacatggcggaatacgcggctcccaaggttcgcggtatcgccaagccgctgctcgaagtcctggccggtatcccgaccatcgtctacggcttcttcgccctcgtcaccgtcggcccgttcctgcgcgacctctcgtcccaggtgaacggtctcctgaccggcgattacagcaacttcatccaggcgcagagcgtactgacggccggcatcgtcatgggcatcatgctgatcccatacgtctcctcgctgtcggatgacatcatcaccgccgtaccgcgcgccctgcgtgacggttcgctcggtctcggcgccacgcgctcggaaacgatcaagaaggtcgttctccccgccgctctacctggcatcgtcggcgcgctgctgatgaccgcctcgcgcgccatcggcgaaaccatgatcgtcgtgcttgcggccggcgtcgccgcccgcatccagatcaaccccttcgagccgatgacgacggtgacggtcaagatcgtcaaccagctgacgggtgacctcgagttcacctcgccgcagacgctggttgccttcgcgcttggcatcacgctgttcttcatcacgctttgccttaacatctacgcgctcttcatcgtgcgcaaataccgggagcagtacgaatgacggacgttgtttcctcctcgcagggcgtcgtcgtctccaaggcgccggcccgccgcgacatcggcatcaagcgtcgctacgccgccgagcgccggttccaggcttatggcatcgccgccatctccttcggtctgatcttcctcgccatcctgatcacgacggttgtccgtcagggctacacggcattccagcagaccgcgatcacgctccccatcgagttctccgaaaaggttctcgatcccaacaacaagcgcgccacggacccctcggtgctgatcaccggcaactatccggtgctgatccgcgacgccatggtcaagacattgggcatcaacgcccagagccgtccggaaacgcgtgacgccaccgcgatgatctccaagggcgcgccgatcgtgctccgcgacatggtcgtcgccgacccgtcgctcatcggcaagacggtcaacgtcacgctgctcgccgacgccaacgtcgactcggccaacaagggccagatcgatctgacggtcgacgagaagaaccgcaaggtcaacgatcgccaggtcggctggatgcaacagcttaccgccagcggcgcgctgaccaagcaattcaacaccggcctcttcgtcaacggcaactccagccgccctgaggccgctggtctcggcgtcgccctgatcgggtcgctctacctgatgctgatcgttctcgccttgtcgctgccgatcggcgtcgctgcctcgatctatctcgaggagttcgcgccgaagaacaagctgaccgacctgatcgaggtcaacatcaacaacctcgcggcggtgccctccatcgtctacggtctgctcggtctcgccgtcttcatcaacttcgctgggctcccgcgctccgcgtcgctggtcggcggtctggtgctgacgctgatgacgctgccgaccatcatcatcgccacccgcgcggcgttgcgcgccgtgccgccgtcgatccgcgccgcggcgctgggcctcggcgcctcgaagatgcagatggtgttccaccatgtcctgccgctggcaatgcctggcatcctgaccggcaccatcatcggtctggcgcacgcgctcggcgaaaccgcaccgctgctcctgatcggcatggtcgccttcgtcgccaatgcgccgaccaccccgatggatccttccacggctctgccggtgcaggtctacatgtgggcaaacgaagccgaacgcgcctttgtcgagcgcacgtccggcgccatcatcgtcctgctcctgttcctgatcgtcatgaacctcggagccatcctcttgcgtcgtcgctttgagcgccgctggtaaacggagtaaacatcatgaacatgttgacggaagcagcagttgagaaggcgctagaccagaagatgaataccattccgtataaaatgatcggccaagacgtctcggtttactacggcgacaagcgcgcgcttttcgacgtgaagctgaacatccgcgaaaacaccgtgacggctctcatcggtccgtcgggctgcggcaagtccactttcctgcgcagcctgaaccgcatgaacgacacgatcgacaactgccgcgtcaccggcaagatcacgctcgatggcgatgatatctacgatccggatatcgacgtcgtcgaactgcgcgcccgcgtcggcatggtgttccagaagccgaaccccttcccgaagtcgatctacgagaacgtcgcctacggcccgcgcatccatggtctcgccaagacgaaggccgacatggacgtcatcgtcgagcagagcctgcagcgcgccggcctgtggaacgaagtcaaggaccgcgtgcatgaaggcggcaccggcctctcgggcggtcagcagcagcgtctgtgcatcgcccgcgcgatcgccgtcagccccgaagtcatcctcatggacgagccctgctcggcgctcgacccgatcgcgaccgccaaggtcgaggaactcatccacgagctgcgtgaagcctacacgatcgtcatcgtcacgcactccatgcagcaggcggcccgcgtctcgcagcgcaccgccatgttccacctcggtaaccttgtcgaggagaacgacaccgacaagatgttcaccaacccggacgatccgcgcacccaggattacatcatgggccgcttcggctgatctccgaaaccggtaaacctcaggacattcaaggataagccccatggcatcgacacatatctattccgcttatgacgatgatctcaagttcctgacccgccgtatttcggagatgggcggccttgccgagcagatggtctcggacgctgtccgggcgctggtcaacggtgacatctcgctcgcccagaaggtcatttccgacgacgtgatcctggacaacgccgaacgtgaagtcggcgaaaaggccatcatcacgatcgcccgccgtcagccgatggccgccgaccttcgcgagatcatgggttcgatccgcatcgccgccgacctcgagcgcgtcggcgacctcggcaagaacaccgccaagcgtgtcatcgcggtccagagcaccggcgttccgcgcaagctcgcccgcggcctcgagcacctcgccgaactggcgctcgtccagctcaaggaagtgcttgacgtctacaccagccgcgtcgccgacaaggcgaagtcgatccgcgagcgcgacgaggaaatcgacgcgatgtacacctcgctgttccgcgagatgctgacctacatgatggaagatccgcgcaacatcaccagctgcacgcatctcctgttctgcgccaagaacatcgagcgtatcggcgaccacgccaccaacatcgctgaaaccatctactacatggcaaccggcgcccagccggaaggcgagcgtccgaaggacgatacggctaacaccgtcggcgcggtcacggaataagcgtgacggacccgcgccaccaggagaccgagacgaatgatcccaagagtagcagtcgttgaagacgaagaagcactgagcgtgcttcttcgctataaccttgaggccgaaggctttgaagtcgataccatccttcgcggtgacgaggccgagatccggctgcaggagcgcacgcccgaccttttgatcctcgactggatgctgcctggcgtatccggcatcgaactgtgccgtcgcttgcggatgcgcccggagacggagcgcctgccgatcatcatgctgaccgcccgtggcgaggaaagcgaacgtgttcgcggcctttcgaccggcgccgacgactacgtcgtcaagccgttctcgacacctgagctcgttgcccgcgtcaaggcgatgctgcgtcgcgccaagccggaagttctgtcctcgctgctgaagtgcggcgatatcgaactcgatcgcgaaacccaccgcgtccaccgcaagagccgcgaagtccgcctcggaccgaccgaattccgcctgctggaattcctgatgtcgtcgccgggccgcgtcttctcgcgctcgcagctgctcgatggcgtctggggccacgacatctatgtcgacgaacgcaccgtcgacgtgcatgtcggccgcctgcgcaaggcgctcaacttctcgaacatgcaggatgtcatccgcaccgttcgcggcgccggctattccatggaagcgtaagcgcttccagttctcacgatccaacgaaaaacgggccccgcgagggcccgttttcttgtgttccttatccggctttccgggtcatgcgacccggttggctgccttgcggcgctcgttgaccggctggtaggccatgcgctggtgataggtgcagtagggcgacgtatccggggactcgcagccgcagaagtggaaatcatcggtcagcggatcgccgaccggccacttgcacgtgcgctcggtcagttccgtgagaccgaggcggcgtgaaatcggaacgaccacgttggcggacggacggaagcgaacttcctcgatcgcatcgatgtccatctcttccttgagcatcgccgaaccctgtgggcgggcgacggcacgggcgggcgagatgcgcgcggaattgaagttgctggcggggcgtggcgtggatgccgccgggcgcttcggcgctctcgtcgccgtcgttgcgccgccggccttggcgcggcccggaaggttcaggcggtggaccttgccgatgacggcgttgcggcttacaccgccaagttgtgccgcaatctggctggcgctcaggccctcggcccaaagcttcttcagtctttcaacgcgctcgtctgtccagttcatgccctgtctccgccttattagcgttggtgtaggcagaatccttcacccatggcacggacgtgtccggaccaagaaacgcttgctcgattttggtgactagttccgccgcatgcagtctagtaattgagttttaacctagagtgagggcgactccgtgacaagagtcggttgaatcgcggcgaatcgatttctcggttttccccaacttgctggatggtagagtcatttctgcaacattagctgttgatagctcgccggcgccccgatgcttgcttgacgcatgcggcaaaagctcagttttgttgacatcgcactgcgaaaagacaatagtgcccctcgccgccgaaaggcggcatttttcatttccgggcacccgcttttagccggagtccgggccagtgttgagcgaatgacaggagatcgcgccatggctgaagccgcgccgctttatgatacctactctcgtgccccgctgcggttcgagcgaggagagggcgtgtggctgatcaccgaaaccggcgagcgatatctcgatttcggcgcgggcgttgccgtgacctccgtcggccatagccacccgcacgtcgtcggcgcgctgaaggagcaggccgacaaggtctggcatctgtccaacatttacgagatcgcgggccaggagcgtttcgccaagcggctgacggatgcaaccttcgcggataaggtgttcttcaccaattcgggcgccgaggcactggaatgcgcgatcaagaccgcgcgccgctaccagtattcgaagggccatcccgagcgtttccacatcatcaccttcgagggcgccttccacggccgcacgctggcgaccatcgccgccggcggccaggagaagtatctcgagggcttcggccccaagacgcccggtttcgaccaggtgcccttcggcgatatcgaagccgttcgcgccgccatcaccgatgccacggccggcatcctgatcgagccggtgcagggcgagggcggtatccgcccggcgaccaccgagttcatgaaggcgctgcgccagctctgcgacgaaaagggcctgcttctgatcctcgacgaggttcaaaccggcgtcggccgcaccggaaagctcttcgcgcatgaatggtccggcgtgacgcccgatctcatggccgtcgccaagggcatcggcggcggtttcccgctcggcgcctgccttgcgacggcggaagccgcatcgggcatgaaggctagcacgcacgggtcgacctatggcggcaacccgctcgccatggccgtcggcaacgcggtgctcgacgtggtcctcgaagagggcttcctgcagcacgtcaacgacgtcgcgctggtcttccgtcaggggcttgcatcgctgaaggatcgtttccccgatgtgatcgaggatatccgcggcgaaggcctgatgctcggcgtcaaggcggccgttccgtcggccgagctcctgcaggccatccgtgcttcgaacctgctagccattccggccggcgacaatgtcatccgtttgctgcccccgctcgtcgtcacggccgacgaagcccgcgaaggccttgcgcgtctcgagcgtgccgccgagagcgtgcgcgccaaggcgaagaagacggcttgaatgattgatgacccggccggatggcgggcgtaacaggtatagacagatggcttccccgaaacacttcctcgatctctccgcggtaacgtcttccgacctcagggtcatcatggacgatgccaagacccgcaagcaggccttcaaggccggcaagggcgacaagccgcttgcaggcaagatgctggcgatgatcttcgaaaagccctcgacccgcacgcgcgtctccttcgacgtcggcatgcgccagctcggcggcgaaacgctgttcctttcgggcaccgaaatgcagctcggccgcgcagagaccatcggcgataccgccaaggtgctctcgcgctatgtcgatgcgatcatgatccgcaccaccgaccatgcgcgcatgctggagctcgccgaacacgcgacggttcccgtcatcaacgcgctgacggatgacacgcacccctgccagatcatggccgacatcatgaccttcgaggagcatcgcggccccatcaagggcaagacggtcgcctggatgggcgacggcaacaacgtgctgcattcgctggtcgaaggggctgcccggttcggctatcgcatgaacatggcggtaccccttggttccgagccgaaggatcactatctgaactgggcccgcaatgagggcgccgaaatcatgcttggtcatgatgcagaccgtgcggtcgccggcgccgattgcgtggtgaccgatacctgggtctccatgaatcaggaacatcgggcccggggtcacaacatcttccagccttatcaggtcaattcggctttgatggcacaggccgacaaggatgcattgttcatgcattgcctgccggcccatcgtggtgaggaagtcacggacgaggtgatcgacggcccgcaatccgtggtcttcgatgaagcggaaaaccgtcttcatgcgcagaagtcgattcttgcttggtgcctgggcgcgatctgaaccatactggaggccacatcgggccggacaggcctgtggccgcgctggcggatggacgggctcgtccgttgccctcagactaggagaagaccatggcagaagctgcagccgccctcggcgaattcgatttcgccggcgatgatcatgtcgttccgtttcaggtggaaggcctggatgtgcgcggtcgcgccgtccagctcggcccgatgctggatgcgatcctcgaacgccacaactatcccgcacccgttgcccgcctgctggccgaggtcatcgcgctgacggtgctgcttggcacatcgctgaagttcgaaggcaagttcaccgtgcagaccaagagcgacggtccggtcgatctgcttgtcgccgatttcacgacgcccgagaacgtgcgtgcctacgcccgcttcgaccagacgctgctggacgaggcggttgccgccggcagaattgagcccgagcagctgctcggcaagggcatgctggcgtttaccatcgaccagggcaagttcagccagccttaccagggcatcgtggcacttgacggcgccacgctggaagacattgccggcacctacttccgccagtccgagcagatcccgacgcgcgtgcgcctggccgccgccgagctgctcgaccgcgacgagcaaggcaagccgcgtcatcgctggcgggcagggggcctcgttgcccagttcctgccggaagcgcccgagcgcatgcgccaggccgacctgcacggcggcgacggcgatgaaggcaccgtcaagcatgcggaagacgatgcctgggccgaagcgcgttcgctggtggaaaccatccacgcagatgagctgacggatccgcaggtcggcgtcgagcgcctgctgttccggctgttccacgagcgcggcgtgcgcgtttacgagccgcgcgaagtgttcgaccgctgctcctgctcacgcgagaagatcaagggcgtgctcaagggcttctctgccgaggaaatcgaggcgagccaggaagagggcaagatcgcggtgacctgcgagttctgctcgacgacctatcgcttcgaagcggaagagctcgcgcaggcggcggagtgatcggttagcgaagggtgatcagttcagcactctgagcaggccaggtgaatcaagcgagaaggcgggaatttccacctggaaaatctcgccttcgtcggtttgcatctggtagtggccgaacatcaggcccgagggcgtatcgagcgggcagcccgacgagtattcgtatgtgtcacctgggctgagtgtcggctgctcgccgaccacgccggcgccgctcacttcatcgacgacgccgttctggtccgttatgttccagtagcgattgacgaggcgtaccgtgaggtccgaattgttgctgataacgatgcggtagccccacacatagcgatcgtcgtccgggtcggattgctcctccaggtaaaagggctcgaccaccacttcaatatctcgtgtcagggcgcggtacatgcctacaccataataagaataccttactggtatcttataagaggtgctgcaggtcaataaaccaggccggaatccgcaatcaattggctgtaagcgcgaaaaattcgcgcgttaagactaataccataccagtctggcgcgagtgaatttccaatatgcgcgtttaaatccggccgggccacatcgacccggccggctattcttgatcaggccttgatcttcgacagcgcctgcgcgaaatcctcgatcaggtcgtcggtatcctcgatgccggccgacaggcgcacggtgcccggagagatgccgagttcggcgcgcgcctcgtccgtcaagttcttgtgcgtggtcgtcgccggatgggtgatcaggctcttggcatcgccgagattgttggagatcttgacgatatcgagcgcattctgcagcgcgaacgccgcttccttgccgcccttgagctcgatcgccaccagcgtcgagccgcccttcatctggctggcgacaatatcggcctgcggatggtccttgcggccggggtagatcaccttggccacctgcttctgctcggcgaggaagtcggcgatcttgccggcattttccgtctgctgcttgacgcgcagcggcagcgtctcgagacccttcagaagcgtccaggccgtgaacggcgacatggccggaccggtgtggcggtagtagtcttgcagatgctcggtcacccattcgcgatcagacaggatcacgccgccgaggctgcggccctggccgtcgatatgcttggtggcggagtagacgacgatatgggcgccgagttccagcggcttctggaagatcggcgtcgcgaagacgttgtcgaccacgacctttgcgccgacctggttggcaagcttggcgacgcccgcgatatcgaccacttcgagcgtcgggttggtcgggctttcgaggaagaacaccttggtattggggcggatcgccttttcccagttctccaggtggcggccatcgaccagcgtgcattcgatgccgtatttcggcgccagcgtctcgaccacccagcggcaggaaccgaacagcgcgcgggcggccacgatatgatcgccggccttcacctggcagaggatggcggcggcgacggctgccatgcccgatgcggtggcgcgggcttcttccgcgccttccatcgcgcacatgcgcttttcgaacatgtcgttggtcgggctgccgtagcgggcgtagatatagccttcggtctcgcccttgaagcgcgcctcggcggcttccgcgctgtcgtagacgaagccttgcgtcagatagatcgcctctgaggtctcgctgtactgcgagcgcagcgttccgccatgaaccagttgagttgccgggcgccaggtcttgctcatgaatcaccactttcaaacacaaaaaaaccggccgcgaatgcagaccggtttcaacccggtctatttagccacttgtttaacgtggctgcaagccgaccggccaaatcaccacgggataaagctgcaatactgccgttgcgtgcttgcgtcaattcctcgattttggttttgtctgcggcaaattatggatggggcatgatggctcgcgaaacaggaatattggcagaccgcgcgatcgcggcgttattcgagaccggacggctcgtcgccgagcgcgaactcgacagcgaccaggtccagccggcgagcctcgatctccgcctcggcgccaaggcgtttcgcgtccgcgccagcttcatgcccggtcccaccagtctcgtctccgacaagctcgaccggttgaagctgcatgtcgtcgatctcacggagggcgcggttctcgaaaccggctgcgtctacatcgttcccttgatggagcgcctcgatctgccggccgacatgtcggcctcggccaatccgaaaagctcgaccggtcgcctcgatatcttcacccgcgtcatcaccgattacgcgcaggagttcgacaagatcccggccggctattccggcccgctctatctcgaaatctcgccgcgcaccttcccgatcgtcgtgcgtcgcggctcgcgcctgtcgcagatccgcttccgcatcggccagtcgctgctcggcgagccggaactgctggcgctgcacgatgccgagacgctggtcgcaagcacaaagccgaatgtctcgggcggcggcatcgcgctgtcgatcgatctcgccggcgacaaggacggcctgatcggctatcgcggcaagcatcacacggccgtcgtcgacgtcgacaagaaggcacagcacgacatcttcgatttctgggagccgatctacagccgtggtcgtaacgaactgatcctcgatcccgacgaattctacatcctcgtctcgcgcgaggcggtccacgtgccgccgcattacgccgccgagatgacgcccttcgatccgctggtcggcgaattccgcgtccattacgccggcttcttcgaccccggcttcggccacgcccccgccggcggccgaggcagccgcgccgtcctcgaagtccgcagccacgaggtccccttcattctcgaagacggccagatcgtcggccgcctggtctacgagcacatgcaggaacaccccgaaagcctctacggcaccggcctcggctccaactaccaggcgcagggcctcaagctctccaagcacttccggatctgagccacatcaccggcaagtgcttcaaggccgcttgacagcgatcatcatctgttggaaatctgcgcgtaacgcgggtgtagctcaatggtagagcagcagcttcccaagctgaatacgagggttcgattcccttcacccgctccagtttttccagcacttatcggcatcgtcgcccctacttcagcatcggccaggtgtcggaaagcttgtagccgccggggaacgggtcggagggatcgagcatcagctgggcggtgccgctgatccaggcgctgcctgtgatcgagggaacgatcgccttctggcccgcgatcgtcgtctctttgacgatcttgccgacgaatttggtgccgatgatcgaaacgcccgtcaggctctcgccttcgtgcaactggccgcgcgcgttgagcagcgccatgcgcgccgacaccgccgtgccggttggcgagcggtcgatcttgccgggctgaatggcgacgacggatttcgccagtagctctccattcttgcgatagggtattccggcaaagaggcagaacgagatgtggttccaccccgtctcctcggggtgcgagaagcccaactgccggtttgccgcgttggtgatcttgatccccgtttcggcgatcagtcgcgcattttcggggataagctcgataccgacctgctcggggtcgacgaccacgaaactgtcgccgccataggccgtgtcgacggtcagcgttccgatgccggggacatcgagcgcgacatcgagcttctgcgcgaagctcttcacgttggtcacggtaatgcgctcggccttgccgttgcggcattccgcctcgacctcgacgagcccggccggcgcttcgagcaccatcctcgtcaccggttccgtcatcggaatgatgccgctgtccagaaggacggtggaaacgcagatcgagttcgatcccgacatcggaggggtatcctccggctccatgatgatccagcccatctgcgccttggggttcttcggcggcaccagcaggttcacatgccggaagacaccgccccgcggctcgttcagcacgaaattgcgcagtgtctcgtccctggcgatccagcgagattgctcccagacggtctcgccaggcggcggcgcgacgccaccgacgatcacgtcgccgacttccccttcggcatggcagctgacgacgtggacgattttggtggtacgcatcttctcgctcttttctcggtgctcgccggtgcgacgccacggcgaagcgggtgacgaatcatatcatgcaggcccgcgcatcattgatgaagcgttttccgcgcgcctggataatccgaatggtccatcccgatacacgttgagccctaacgctttccgcttacttgacgaatccctaatgaacgtggttaatttttaactattctccggtacatggaacttggacggcgctctggccgttactggcgcacacgaggaggaatagcgaaatgcttctgaagattttcaccgcaaagcgcgatgtcgtcgatgccgatgacaccggaacctacgcggatggctaccatatgccggaactcgacattgccgcctacaagcgcagcgaccgccgctcctcctacgagcgcgattatggccgtggccgcaaggctgaagaggtttcgctcggtctcgtctaggcgatcgatcgcagcatgaatgaagtcggcacctgccggtatgaaaatgggcggcctcgagccgcccatttcgtttctgcgagaggcttgtcgctcctcagaattccgtccagtcttcatccttcttttccacggaaggcgtgccgccgaatgcgttggcgagcttctggccgagagcgtgcgccggcgaagaggtcggccgcgtaacgcccgaggtggcgatccgcaccggtgccttgcgggtcagcacgggcttggccgaacgcggtgccatgggttcgttggcatccagcaccacccttggcgtaaaggccacggtgccgccgccggtgccggtcagcttgaactggtcgagcaaggtgttgagcgccgccgcctcggtcgccagcttgtggctggccgcggtgctttcctccaccatcgcggcgttctgctgcgttccctggtccatcgtgttgaccgcggtgttgatctcctgcagtccgatcgattgctcgcgcgccgcctcggcgatcgcgttgacgtgctggttgatctcctgcacctcaagaacgatctcttccagcgccttgccggtctcgccgaccagcgaaacgcccgacttcacctggttgcccgaggtcaggatgagcgactggatttcgcgtgccgcattggcggagcgttgcgcgagttcgcgcacctcctgggcgacgaccgcgaagccctttccggcttcgccggcgcgcgctgcttccacgccggcattgagcgccagaagattggtctggaaggcgatgtcgtcgatcacgccgatgatgttgccgatcgatgccgaggactgttcgatctgctgcatcgcgttgaccgccttgcgcaccacctcgccggatcgctcggcgctgtggcgggtttttgacaccagcgtgcgcgcctcttccgcccggcgcgcggcatccttcaccgtcgtcgtgatctcttcgagcgctgcagccgtctcttcgacagaggccgcctgctgctcggtgcgccgcgagagctggtcggccgaggagcggatctcgccggcgcccgccgtaatcgcacgggcattttcgcccacggtctgcatggtttcgttgagcttgaagatcgaattgttgaagtcctggcgcaggctgtcgaggctgccttcgaacggggtgttgatctgcgagatcagatcgccggtcgcaagcttgcgcaagccgtcgccgagcgcgctcaccgtgcgcgaaagatcggccgcctcggtggcgcgctgcgcttcgatttcgcgccgttcgctgtcggtgagattgcggttgcgctccgcctcctgctcgaggcgcaggcgctcgatggcgttgtcgcggaagatcgagacggcagccgccatttcgcccacctcgtcgcgcctgtccatgccgtcgacggcgctcgacgtctcgccctcggcaagccgcgtcatgcgctcgcgaagccgggccatcggcgatgtgatgccggcctgcgcgatccagatgctgagcccgatcgccgccaacacggcgagcccgaccaccacgaaacagagaaggatgcggcgatcgaccttggcggaaagcgcgtcgccgccgtcgttgagttggaccatcagcgcgtcgttgttggcgatcatcttcggcgtgacaagcgaaagcttggcgttcagctcggccgccgtggcctgcgcgccggtgcggtcgccggctttggcctgctcgctcacctttttcgacaggctgtccatctcgtcgataccggcgatgatctcgtcgatcacggacttgcggttcggcacgagctcggctgcctgctgtagccgctcgcgcgcctgctgcatcttgctcggcgccgcgatcgccgcgtcgaagtcgggcgtgccgggggtaaggtcggagatgacggttgcctgcagcaccgccgcggtggcggacgcgctggcgcgcgaggcctgcatcgccgcaagcgcttcatggtcgatgaaagcgctgtaggcggcatcggcgccgcggaattcctcgatgacgtaaacgagaccgccgatcgcgatgacgccgagaagcgcaacgaccgagatgatcttggtgcggattttgtagtttttcagcatgaatgggcccatgggctgcggccagggggtggccggatacgatcgttttcaaaaggcaggcggtttcgaaggcaggatgacgctttcgatgccgcgggaaagatgccggtaaggctcgacaggcgcatcatgcattcggtcggggaccggtgtcgtcgaacgcgactagaatccatattgcttaaggcgaacctaacgcatccggatgtccacgaaatttagttcgtgaccggtcacggagaggatgcgggggcggagcgcatcgttggcggcgaggccgtcggcagatgcggggtcttgtcccagaaaaacggcttgaaatgcaattgccacacggcgcgccatgccgcagccgatatcagcatccagtagaggggcagggcgacccagcgccagccgacctttcgcttctcgtcgcgcagcatggcgcgccggccaagcaccagcagcaccacgtagctgcccagcatgttggaaacatcgatcaggaacaacagcgcctcgccggtgccgggcatgggaaagccgagcatcatgtagctcgcggcggtcaggatcagcatgatcatccacggatgcgtgagcgaggcgacgagcatgccgccgataagcacctggaagacgacaaacggccagacccccatctcgcgcatgagcttgccgggtgcgcgcatcatcaccagccatgtctgcagccagcccttgaaccatcgtgtccgctggttgagccagacgtcgcgcgtggtcggcgcgtcctcgtaggtcgggcagtcgatcacgccgcagcggtagccgagcctgtagagccgcaaaccgagatcggcgtcctcggtcacgttataagggtcccacccgccgcacgccctgaggtcggcgacgcgcagatggtttgacgtgccgccgagcggcatcggcagccggtgctttgccaacatcggcagcaacaggcgaaacagcgccgcgtattccagcgcgaaggcggcgctgatccacgagccgccgacattggagacgatcagcggcgcctgcaggcaggcaatgtcgtttcggctggcgaggaaagtcgcgtaggccgcccgcaactggtcgggatgcggcctgtcctcggcgtcgtagatgacgaggaattctccgcgcgcggcgccgagcgcgtagttgagcgccttcggcttcgttctcggatgggcgacgggcaccgcgacgatttcgaactgcggcccgagatcctgtttttcgagcgccgcgatcgtcgcatggtcgtcggcctcgcatatcagcttgatatcgagcttggcggtcggccagttgaactgcttcagcgccgcgacgagctggccggcgacctccgcctccttgtagagcgcgacgaacacggaatagacgggcagccgctcggttggctgcggcgctggctgcggaccgcgacggtatcgcaacgcgcagattctcagcaggatcgccgccatgtagacgagcgacagcgccaggtgaacgatagcgaccagcggcagattggagaacgccgcgaaaccgaacgcgcacagaagagcgccggcgatgaacccctgcttgcccgagagcacgatgcgggcgctgaaccgcccgctgtcctcgaacagcgtcccgatgctctgcttcacccgccgcgtcgcaccgacgcgccagatggcgtcgcgcatcgccgtgggggtggtgacgatgatccgctccgcaagccccggtcgcgcctcgatcgtccgcgccagcgccagcagccggccggcctcgggaacgatggcgatcatcgccttgtcggcatagtccagccgcaccgatcgcgtgtcggaaagctgcgtgtccagtgtctggtcgtcatggatcagggccggatcgagctgcgacaggaatggcaggcgaagcgcgcgggcgagggcggcataatagctctccgcatccacccatcggttggccaggagctcacgctcgatcgacgtgccgttgtggcgggccgcggccgccgcgcgcgcgatcgtcggctttccgatgccgagccgaagcagcgtctcgatctcgatctgcctgatatcatcgaccacacccgccggcacggccggcgagatcggaattttcggccgctgctgaagcgtcgtggaacgggtgctgatcccgcccgacgcatattccccgatacgcatgactctgatacaccgtcgttgaattggcagtgcagtccccggggcagatcataatggtgcgatttaagctggcatctctcaatcctaaggggtttttcagcctttggctgtttctggttgcaatttggctacctctttcggctgcggcgcagcaggcggcgccctccttgcccttgctgttcgacagccgcgagcgtctcgccaggcccgatttgaccagcctggtgcgcctgcgcttcctgacttcagtcgattttccgccgttcaatttcatggatcagaacggcaagctctcgggcttcaacgtcgatctcgcccgcgagatctgcgccgaactggagatatcggacaggtgccagatccaggccttgcccttcgcaaatctcaaggacgcgctggccgcctcgcagggcgatgcggtgatcgccggtctggcggtcggcagcgagctgcgcgggcagttcgccttctcgcgtccttacctgatgctgcccgcccgctttgcccgcaatctgaaagcgccgatcacgggcgagaacgcggcaagccttgccgaccgccccgtcggcgtcgtcaaggaaacggcgcatgccgccatgctttccacctatttccccaaggtcaaggcgatcccgttcgatagcaaggaagcgctgctggcagcgttgaaggacggcaaggtcgatgccgtcttcgccgattcactgcagctctctttctgggtgtcgtcgcaggcatcggaaaagtgctgcgccctgttcgacggtccctatatgtcgcaggagttcctgggcgagggcatgaccatcatgctgcggcaaaaggacgaggtgctgcgctcggccttcgatcatgcgctcgcggatctgtcacgcagcggtcgcctgcaggaaatctacctgcgctacttcccctatgggctttactagtcacgtcgcgcaaaagcgtgcagcggttttgctgcggcgacatgcgataaagtagacagttcagcccttgcggaagcgggcaatggcgctgcgctcgatcgcggcgcaggtcagcttgtcgaggccgagccggtcgcgcagcaggctcagcagccgcagttcctcggccttcaccgagaggtcggccgacgcgacctcgaccgccagcgcataggccgtgtcgtagagcttcggcgacagcgtgtccttgacggtttcgagaacgacgtcgagcccctcgggaccggacaagagagcggcgcagtcgcgcgcggcggaaatcagcttgtcgtcgtcgaagcctcgaaacacaggcagaaagccgatcagctgtccgatacgctccatctcccggtcattcatcgtgctgtcgacggcggatgccatgaccatcacgtagatcaacgcgtcgtgggcggaaagcggcttgttcatgtctgcatgattcctctgcgatgtcagcagagtttaggaattggccgcgcccattacaagggatcgctcatatcttggggctgcgtcaggtcgagcgtatcaatcgcgccggcctggcggggatcctgcccgtagatgccgtttccatctcgcttcgccttggcgcccgcctccgcgaaggctgagcccgcctcggcctcggcccacccattctcgatcagccaggcggacaggtcctgcgtgccgatcttgcagctggccatcgcgatgccgctccagtcgggatcgttgagatcgcagttgacggtcctcagccgcaggaagagccggaaattggtcttcgccagcatgccgcatggccattccgggcccttggcactcgggcaggtcttgtcgaccggtgtcggtgtcagtccggccaattgcagccgcctttcgccgaagccgagcatgccggcgctctcggccaccgggcgcggcaggtcgatccctttctcggccaccgcgacgggctttttctccggctccggcgcctgttcacgctccagtggtttgccatcgaccgaagacggatagaattggctggcgtcgtccaccggccgggccgtcatgctggtgtccgggtttgccgtcggctgagcgggcgcagaggtctcaggcccggccgcctcttgcgccggttgagtggcccgtcgcgcatccgacgcatcgctcaaccgatttccgccagcggtgatcaggccgatgacgatcgcaattcccgcagtcgctgtcaggagtgccgcaggcttcatggaagattttcctactggctggcccagatgatccgggcgatccaatccacgtcggagagttcgatcgttcggttggggtgttcgggattgagcgacatcagctcgatcgagcgcgggctctggcgcatcagcaccttggccatcacctctccctcgcgggtcttcaccacgacgcggtcgttgcggcgcacctgcgcgcccggctcgacgatcagaacgtcgccgtcgcgatagagcggcatcatgctttcgccctgcacctcgagcgcatagacgcccgccttctgcgatggtgcggcaggaaattccaccacgtcccagccctgtccggccggaaagccgccatcatcgaaaaagccgcccgcgcccgcctgcgcgaagcccaggagtgggatggagctgccctgcggcggaaacgcgccctccggcagcgtcgagaaactgccctgtggccgcatgaatgacaggaactcctccatgctggagcgggtcgcctccagcaccttggcgatcgattccgtcgacggccagcgcagccgcccatcggcggaaagacgcttggatttgttgaaggaggtcgggtcgaggccggcgcggcgggcaagccccgagggtgtcaggtcgtgccgttcggcaagcctgtcgagcgctccccagatctgctcgtgtgacagcatgtcgcctgatcccgtgcgcgccacggcgctccctaatcggctgaaagattaaccgcaaggcgagcaggagtaaagagacaagaggaataaaatcctctcctctcgtcaggcgaccattgccatgttgatcttgccgagctggatcaccgcctgcgtgcggctgtcgacgtcgagcttgagaaggatggccgagacatgcgccttgatcgtcgcttcggacacaccgagctcataggcgatctgcttgttgagcaagccctcggcgagcatggtcagcacccggctctgctgcggcgtcagcgtatgcagccgatggatgagatcggccacgtcggggtcctgttcctgtccgtcccggtagctgtcgggtgttgcgatgtcgcccgcgagcaccgtctgtatgccccgccggatatcgtcgatcccggccgatttcgagatgaagccggacgcgccgagctccagcgagcggcggatcgtcgtcgcgtcgtcggatgccgaaacgatgacgatcggcaggcccgaaaactccgagcgcaacgccatcagcccggaaaagccgctgacccccggcatggcgaggtcgagcagcatcaggtcggcatcggggttgtcgccgaccaacttgcgagccgccgcgaaatcgcctgcctcgacgatatcgggatggccctccatcccggtcaaggcctggcgaagcgcatcgcgaaacagcggatgatcgtcggcaatgatgattgtctgctcatgcatcgaaaactccctcccaagagcccgatcatgaagtccatgcaccgccttcctccacggttcatgccttcttgctgcagggactatagcaaatcatgtcttttgcggaagggcattgccctgatcctcgctctggaattccttgacgatccccatgaagctgcgcatccagcgctccatgatgccgatcgagcggtcgatttcggcgtcggagggaagcgccttgttgacgatgctcttgttctcgagcgcggtgacccggtccgccagcctgtcgagctccccttcataggcggcgcgttcgtcggcggccatgcggcagaccagcgccccgtccttctgctcgcagagcgacatggcgccggtctggcgatcgagccgcacgaaacggtcgccgctgcgctccagctggaaccggctcgagtccggctcggcggccgaaacggcgagcggaatgagcaccaaggcgaggctgagcgtgatatttttcatggtttcctccggaaatctctgtggctgccgcatttttttcgtgcggcgcgtggacatcgccgcgcaactgcggcaaagcccgggaaagaccagccattcatgaggccatcatgaccctgacacccacgctttacaagatcgtgacggaaacgctgtggcgggacgcccggcaaagcggcgtttttcgtggcgccgcgatcgatctgaaggacggcttcatccacttctcgacggcaagccaggcggtgcagacggcggcgttgcacttcgccggtcaggccggcctgctgctggtcgccgtcgatggcgccgcccttggcgacaagctcgtcttcgaaccctcgcgcggcggcgatctcttcccgcatctctatgcggaccttccgctttcgtccgtgctctgggaaaagcccctgccgctcgacgccgaaggcaaacacatctttccggaccttcagccatgatcgatctcttcaagcacgccgcccgcaagggtctcttcctcttcgatccggaaacggcgcacggcatgtcgatcgcggcgctgaagtccggcctcgtgccggcctgcgccgcaccgttggacaagcgcctgcgccagacggtggccgggctcgaattcgccaatccgatcggcatggcggccggctacgacaagaatgccgaggtgccggaagcgctgctgaagatcggtttcggcttcaccgagatcggcacggtcacgcccaagccgcaatccggcaatccgcgcccgcgcatcttccgtctggtcgaggacgaaggcgtgatcaaccgcctcggcttcaacaacgaagggcacgacgccgccttcgcgcgcctgtcatccgtccggggcaacggcatcatcggcgtcaacatcggcgccaacaaggatagcgacgaccgcatcgacgactacgtcaggggcatccgccgcttctattcgctggcgcgctacttcaccgccaacatctcctcgcccaacacgccgggcctgcgcgatctgcaggcgcgcgaaagcctatcggcgctgctgtcggccgtgcttgccgcgcgcgacgaggaagccggaaagtccggccgcaagatccccgttttcctgaaggtcgcgccggatctgacggaagagggcatcgatgacatcgccgccgaggcgctctcgcatgcgctcgacggcctgatcgtctccaacaccacgctgtcgcgcgacggcctgaaggatcagcgtcaggcgaaggagcagggcggtctctccggcaagccgcttttcgagaaatcgaccgcggttctggcgaagatgcgcaagcgcgtcggccccgatctgccgatcatcggcgtcggcggcgtctcgtcggccgaaaccgcgctggagaagatcaaggccggcgccgatctggtgcagctctattcctgcatggtctatgaaggcccgggtcttgcgggtgacatcgttcgcggcttgtcgaggctcatggaccgcgagaaggcggcctccatccgcgatctgcgcgacagcaggacggattactgggcgggtcggaacgtctgatcggcccgctgcttcaccctcagcaccagcaggaggccgcgggagagcaagaacaggttgatcgccagccacaggccgtggttggcaaggagcggcacgaggatcgcgaccgcggccagatagatggcgaacgacatcagcatgcggttgcgcatgtcgctcgaccacgtcgctccgatgaacacgccgtccatcaggaaggcgagcgcgcccgtcagtcccgtgatcgccgcccagggcagatagagacttgcgacctgacgcacctgtgatgatgtcgtcaggctcgcgatgagcgtatcgccggccaggaacagaaacagcgagatgacaccggcaagcccgaacgaccagatcgccgtcagcttcaggccgcgatcgaaggctgggcggtgacgggcgccgacggcgcggccggtgatctgctccgcggcgttggccagtccatccagataaaagccggatagcatcaggaagttcatcagcaccgcattggccgccagcgtcaccgcgccgaagccgctgccgatccgcgtcatgacggcgtatgcgccgaccagcacgaaggtgcggatcaggatgtcgcggttcagcgtgaaaagctcggccatcggctgccacgcgaagatctcgcggcgcttcggccacgcgccgcgaccgaagcttgtaagcacgatgaacagaccggcaagcgccccgatcgtctcgccgacggtcgtcgcccaggcgacgccggatattccccagtcgagccagaggccgagggcgatcgccagcacgatgttgacgccgttgatcatgctttgcagcaggagaccgacgcttccctgcccgcgcccgagcacgaagccgaggatggcgtagttggcgagcgccgccggtgcggcgagaatgcggatggaaaaataggtgctggtcgcctgcgccaccgcgttttccggccccatcagcttcaggcccgccgcaagaagcagcggcgacagaaagagcagggccacgccgcagccgagcgccgataggatcgcgcgccagaacacgccctgctcggcatgccgctcgcgccggccataggcctgcgccgtcagccccgtggtcgaggcgcgcaggaagttgaagctgccgagaatgaggtcgaagagcatcgccccgatcgccaagcccgcaagcgcatcgggatcgcccatgcggccgacgacgccggtgccgacaaggccgagcagcggcgtggtgatgaagccgagcgtcatcggaatggcgatcgacagcaccatccggtgcgtcacctcgaatgccagtgcgttgccgctatcgccggtgtccaagcctgcgttcaagtcctgcctcccgacagagaggcgcaatcacctcagttggaaagcaccatggcccaatagggcacgttgcgggaagcgggattgtaggcaaccgcgacgccgagaccggtatagcggccgagcatgttttccaggtgggatggcgagttgatccaggcggtgacgacggcgggaaccgtctgctggcccgtggcgatgttttcggcggccggcagccgcacgccgctcgccttcacgcgcggaccgaagccgtcggcgatgcccatgacatgcttcatcttgccggccgctgccatgcgcttggcctggaagagggcggcggccgtcgcggccggatcgacctgaagcggcggcaggccgttcttggcgcgcacctggttgacgagcggcagcgatgccgccgtctggtcctcgccgttggatggcgtcgagggctctttcgggccggtggcgcagccggcgacgccggctgcaagcgcaagagcggagaagcgcagaagactgcgccgtgagagatcgattgaggtcatgttaccggcgatagctgaagagacggatgatgaggaagatcggaatgacgatggtggcgcccagcagcagatagtcgccgacgcgaccaagcgcggagaagccgcggcgccagacctcgaggacgaaatcgcggacgccgtagacgaaatcgagcggtgccagcccgaagacggccatgatgaagccgacgatcagcgacaccaccaaaagcttgatcaacgtacggccgagcgagtcgcccagaaacttgttcacctgatcggacatgcatcatctcctgttcacccctgagatatgggcgcgaatcgttgcccgcaagctttttcagggctgttgcatccgcctctgaaataggacttgagtttttttgtggccgccgccaaatgcgggccgcgccaacaggtcaccatcatgccgcctcatctccagacttcaggcgatgccatcgccgaccgccgtgccgattacgccaggatgctggacaagggcggcgagccggatgccgccgccgaactcatggagcaggcgctggaactggtgccggattgggcggtcggctggtactggcttgccacctaccgcgaaaaatcaggcaatatcgctggtgcgatcgaagcctacaggcggaccggcgaactcaccgaagacgatatcttcggcgccacgctgaagctcgccttcctgggcgacatcgccgtgcccgatcagccgccgagcatctatgtcgagcgcctgttcgacgattacgccgcccgcttcgagacctcgctggtcgataagctcggctacgacgtgccggcgaagctcgcccgtatgatcgccgcgaccggccggcattacgctctggccgccgatctcggctgcggcacggggctgatggggccggaaatccgctccatggccggcaggctcgaaggcttcgatctctcgcagaacatgctggcgaaggctgaggaaaagcatgtctacgaccatctcgcccaggcggacctgtcgctgcccgcgcaagcgtccgggctgttttccgatggcggcgcgcatcgcgccgatctcgtcacggcggccgatgtgctgatctatctcggcaacctggagatcgcctttacatcggtcgcgggcctttgcgccgaaggcgccgatttcggcttttcggtcgaggaaaccgaggacgaggatggtgttcacctcgcccattccctgcgctatgcccattcggaaggctacatccgatcgctctgcgcccgccacggcttcaaggtgatcgcgatgagccgcaccaccattcgcaaagatggcgccaacatcattccgggcattctgttccttgcacgcaagatcgcctgacggaccgattcttgcgaagtttgaataggtcagcattgcttacgtatttcgcttgaaaacgcggctgatgagccggataatcccgctcatcagccgaagagcgcgaattcttcccggcgaccaatcattcacatcctctgccgcctgggatctgtccgggcgttcttgaacttgtctgccgttggagattagcgacatgactcagctcatcaatgcccttggcttctggaacacgagcgccacgcgccatacccccgtcgaggacgtgcagggcatcttctccggcagccttgtcgccgcccttggcctatacgtgctggcaagcgccggcttgcttaccggcagcacggcgggcatcgccttcctgctgcactatgccttcggcatcaatttcggcctcgccttcttcctgctcaacctgccgttcttctatctctcgtggaagcgcctcggtgtcgtcttcaccatgaagaccttcatcgccatcggcctgacctcgctgctgacaagcctgcagcccaatgtcatgagcatcgccaccattcatccggcctgggcagcacttctcggcggtctgctcctcggcttcggcctgctggcgctctatcgccaccgcgccagcctcggcggcgtcggcattctcggcatctacatgcaggagcgctttggcattcgcgccggcctcgtgcagatggccgtcgatctctgcgtgcttgcggccgccttcttcgtcaccacgccgcctgtcgtattctactcggtgctcggcgccgtcgtgctcaatctcttcctcacgatcaaccaccgcgccgaccgctacgtcgcgctctaaccgagcagattgccgaagcggaccgaatagatccggtcgcgcccgagtaagtgcgcgatcagcgacggctggtcgaacagccccttcatcgccttgtggcgcagatcgagcccgccgctcatcaccccgaaagccggcatcagcagccttgcgccatcggtggcgaagcagggacggcggatcgatttctcgcgccgccgcacggtggcggaaggatgcaggtgccccgcgatctcgccgctctgcaacccgcccttcggctcgtgccggaaggtgagcccgccatgatgcagttcgtcggcgcaggcaccgggcagatcgaccgtgccgtcagggtcatggttgccgttgatccagatccactcgcgcccgcgcgccatgtccgaaatcagcgtgcgaaacgcctccggcatgtgcgccgagccgatgcggtcgtgaaaattgtcgccgagcgagatcaccagcttcggatcgtagcgggcgatgacggccgacagtaccgtcaacgtcgccagcgtatcatagggcggcagcatcatgccgcgtcgggcaaaggcggcgcctttttcgagatgcaggtcggagacgacgagaacgccggtatcaggcagatacagcccgcccagcggatcgcacacggcagcgatcccatgcacggacgtttccacgcccggcatcgccgcaatcccgttcaattcccgcgccagggccagccggttcatcacgcttgtttcttctccgctcgaccaccctcattcctgtgctcgtcacaggaatccagctaccgcgcgtctgcgcggtagggactcttttcagcccaaggacttgggctggctggatccctgtgacaagcacagggatgagggcgaactaaggtgggcctcagccagtcaccattcaatccatcaaagcttcggcaatcaggtcgtccgccgcttccgccagcagatggtcctgcgcctcgccatgcacatgctccttgccgatctccagcatcacgggcacggcgagcggcgagatgtgctccagcgggcggtgggtgatgtgccccttgattcgcttcagcatatcgccaagacggccgatgtccaaaagcccggtcgccgcgtcctgccgcgtcgcctgcagcaggatgtggtcgggctcgtgggtcctcagcacatcgtagatcagatcggccgaaaccgtgacctgccggccgctcttttccttgcccgggtgccgacgctcgatcaagcccgcaatcacggcgcaattgcggaacgtgcgcttcaaaaggaaggattcgtcgagccagctttcgagatcgtcgcccagcatgtcctcgtcgaagagctcggagaggctgagccggccgcttgatatcatccgccccatatcctccagcccccatatgccgagcgaatagtcggtggcgacgaagccgagcggcttggcgccagcgcgttccagccggcgggtcaaaagcatgccgagcgtctggtgcgccagccgcccctcgaacgggtaggccaccatgtagcagcggctgccgcgcgggaaggtctcgatcagcagctcgtcgcgcttcggcaggatcgacttctccttctggatcgccagccagtcgcgcacctggtccggcagccggtgccagcggtcgggatcgtcgagcatcgagcgcacctgatcggcgagataggtggagagcggaaacttgcctccggcataggatgggatcttcggatcgttggaataggcttggctcgccagcgcctcgttctcgcggatgccctcgaagcgcagcaccttgccggagaagatgaaggtgtcgccgggcgaaagctgctcgaagaaatactcctccatctttccaagcgtggccccgccgcgcccgatgcggccgccttcgccgcgcttcaccatcttcaggttcagcatcgggctctcgacgatcgtgcccgaattgagccggtattgctgcgccacctgcggattggagacgcgccagcgcccctccctggtcttgcggatgcgggcatagcgctcgtaggtgcgcagcgcatagccgccggtagcgacgaaatcgacgacccgctcgaaggtctcccaggaaagatccgcatagggcgaggcgctgatgatctcgtcgtagagttccagcatgtcgaagggctcggcgcaggccatgccgagaacatgctgggcaagcacgtcgagcgcgccgcgcccgataggcggcgtgtcctgcgcgccgatatagttggcgtcgagtgccgcctggcactccatcacctcgaaacggttggcgggaacgaggatcgccttggagggctcgtccattcggtggttggcgcggccgatgcgctgcgccagccgcgaggcgcccttgggcgcgccgacatggatgaccagatcgacgtcgccccagtcgatgccgaggtcgagcgtcgaggtggctaccacggcgcgcagccggttcgccgccatcgccgcctccaccttgcgccgctggccgacatcgagcgagccgtgatgcagcgcgatcggcagattgtcgtcgttggcggtccacagctcctgaaacagcatctccgcctggctgcgggtgttcacgaagagcagcgtcgtctggtgctcgagcagttgcttgtagacgtcggggatcgcgtatttggccgagtgcccggaccagggaatgcgctcttccgtggaaaggatcgagatgtcgggcttggccccgccctccaccgtaacgatcccggcatgccgctcgccaccttccggctgcgccaccagccacttctgcagctccagcggctcggcaacggtggccgaaaggccgatcgtctgcagcttcggcgcaagccgcctgagccgcgccagccccagcgacagcatgtgcccgcgcttcgaggtgaccagcgaatgcagctcgtcgaagatgatgtatctgagatccttgaagaagcggtcagcctcgccattggcgagcaaaagcgccacctgctccggcgtcgtcaaaaggatgtcgggcgggctgagcttctggcgctggcgcttcgaaacgggggtgtcgccggtgcggttctcgacggtgacgggcagtcgcatctccagcaccggcttcatcagattgcgctcgatatcgaccgccagcgccttcagcggcgagacgtagagcgtgtggatgccggtaaaggccgagccaggcggcatcttgccgcggcgggtgaggtcggtgagcgacggcagaaagccggccagtgtcttgccggcgccggtgggcgcgatcaacaatgtgctctcgccggcctcggcgcgcgccagaagctccagctgatgcctgcgcggctgccagcccttctccgcgaaccagcgggtaaagggggcgggcagggatatcaggcgttcgctatcgatctggtccaccgcctgaatgtagttcaaaccgcgacgatgagaaggcggtccgttcgctatcggcgaaaagtgcgaagcctgaggggcctcgcactttggccacgcgatcgatcagtagatgtcgaaggggaaatactgcttggtgatcttctggtaggtgccgttggcaaccagcgcgtcgatcgccttgttgaagcgctccttcagctcggtctcgcccttgcggatgccgataccggcctgcgtctctgttccgggcacgtcgccgagaagcttgcagcaatccttgccggccttgttcagccagtcgacgaccacgaacttgtcggagaccagggcatcggtgcggccgttctgcaggtcggccacggcctcgtcctgtgtcgggtagagcttcgcctcggcgccgcccttggcgtagacgtcgctggtataattggcctgcgtcgtggatgcctgagcgccgaccaccttgcccttcatgtcctcgacggagacacccttgatcgggctgtccttgggcacggcgacggcaagcggcgtcgtgtagtatttgttggtgaagtcgatctgcttcttgcgctcctcggtgatgctcatcgaggcgatgatcgcgtcgtatttcttggcgagcaagccgggaatgatgccatcccaatcctgggcgacgatcgtgcacttggccttcatctcctcgcacagcgccttggccatgtcgacgtcgagccccttcaggctgccgtccgattccacgtagttgaacggcggataggcgccctcggtggcgatccggatggtgtcttcggccgacgccagatgcgccgtggcgagaagtgccacggtcgtgaggaggatcgtcttcttcattgatgttcccttttgaagtgtttttgacaatgcaaccttagctgatcccgatcgcttcacaagccttcgctgaataagcccaaagtctaccgtcccgcgcgcaatcgcggcgccgcggaaagaggattgacgcgcagaataatcatggatatattttatccatgaattgaggagccggtcacatgaaactcggagacggtgtggaacaggccattcacagcgtggcgatgctttcgggtctttccgagggtggcgtgctgtcggccgcagcactcgcggagtttcacggcgtctcgacgagctatcttctgaagcacctccaggcgctctccggcgccggcatccttcataccgtacccggcccgaagggcggctatcgccttgcgaggccggcaaagaagatcacgctgctcgatatcgtgctcgccgtcgaagggcctgcacctgcctttcgctgcaacgaaattcgccagcgcgggccgaacccggcgccggaccgcttctttgccaagccgtgcaacatctcggcggcgatgctgaaggccgagcgcgtctatcgcgccgagcttgccaagaccaccattgccgatctcggcgccgaactggcggagatcgacgacgggacgatcgcagccagaagctgcgcgttcctggaactgcatgaacgtcgaacggctcgctgagccatcaaaggagaaagtgccatgcaaccgcgtttcaatttcgccaaggccgcacccgaagcctacaaggccgtgctcgcgctcgaggattatgtgcagaagtccggcctcgaacgccgcttcatccacctgatcaagctgcgggcctcgcagatcaacggctgcgcctattgcgtcgacatgcacgtcaaggaagcccgccatgacggcctgagcgaacagtggatcaacctcatgtgcgtctggcaggaatcgccggtctacgacgaacgcgaacgcgcgctgctcggctgggtcgatgctgtcaccaaggtcgcccagacgggtgcgcccgatgccgactatgaggcgctgaaggcgtatttcagcgaggccgagatgatgaacatcacggttgccatcggcgccatcaatgtctggaaccgcctggccgtcggcttccgcgcccagcatccgatcgacaagacggccagggccgcctgatatcgatgtgaatgtttacagggccggcggcgatcgccggccctttgtcattcaagtcagctgcagccgccctgcaactgctgctgataggtcgccgccatgttggagaagcgctgcgccgtcttctgcagcttcgggttcgagcgccagtcgccgcgcatatatcccttcggaccggaatagtaggcgaggtagaggctgtaggcgtcgttgagctggatgcccgtcgtctggctgttctgcgagtgataccagccgatgaaatcgatcgcgtcggcgaagttggtgcgccgcgcgctccagtttccggttgccgactggtagtgatcccaggtgccgttgagcgcctgcgaatagccgtaggcggtcgattgccgtttccacgggatgaagccgaacagcttcgtgcgcggcggccgcgcattcggctggaagcccgattccgtgtacatcgtcgccatcaggatcggcaccggcacgccgtatttcttctcggccttctcggcggagcgctgccagctggtgaacaccccgtcgcgctggtcgaacaccgcgcagatgttccgggtctgtttgggcgcggtcgcgcagccggcaagcacagccagcatggcgacggcaaggagagtacggatacgcatgactgaaacctctcgacgtcggagagattactaaccggtaaatcttaatggtcggtttttagacaatgacgaagccgtgatcatcttgtggcgagagcggggcggggctcgccgtcgccggaaaagaccgattactccttgcggaacatcacgctggcgccccagccggtaacgaccgccagaaacacggcgaacaggccgtagagtatgggctgctcgtgcgcggcatcggtgatcgtctgctcgatgccggtcttgatcacgcgcaacggcgccgatttctcggtgacgaacttgccgctcttgaacagataggcgcgaaccgtatgcacgccgttcggaatgttggcgggcagtcgcaggctggccttgaacaggttggagctgacgaagcgcacgccgctcggatcgcggacgtaaaggccgctgcgttcctgcagccgacgataggcatcgcggaattcgccgacattgctggcattgccgagaaagcccatgggcgtcagcggaatgtggtcgatgccgatgccgcgatcggtcagatcgagcggcgtcgttacatcgttgagcatgcgcgagctcgacatcgaataggaatttggcaccgtctcgaatgtcatcgaacgcgtgttgacccagattccgaacacccgttccttcttgcgcacggtggcattgtcgcgcgggccttccagcaccacgaccacgtcatattggccaatcgccagcagcaggctgtcggtattggtcaaggctccgaagatcgtcagatccgccccgtgaaaatcggaggtgatggcgatctcgctggtcgaggtgccgatttccagcccttcggcaatcggctgcgttgcctgtcccggcagcagcatctgcgcgccggcggccgttggcagcatcagggagaagagcagggcacgcagcagacgacgcatcagttgccacctatcgcgaccgaatatatgtcgctcggtgtgacgaccagcgcgacggccaggcgaaggccgacggccagaaccaaaaggccgagcagcgcgcgcagctgttcaccgcgcagcttctggccgacgcggacgccgtattgcgcgccgatcacgccggcgatcatcaggatgaaggcaagcacgatatcgaccgagaagttggtcgctgcctgcaccacagtcgtataggcggtgacgaagatgatctggaacagcgaggtcccgacgacgacgttggtcggaatgcgcagcagatagatcatcgccggcaccatgatgaacccgccgcccacgcccatgaccgacgtcaggatgccgatgccaaagccgagcgctatgatcgggatgacgctgagaaagatcttcgatttcttgaagcgcattttcagcggcaggcgatgaacccagtggtgatgccccggccggcgcggcgccggcggaatgttcttcgacgcccgccgcatggcgttgatgctttcaaacagcatcagcccgccaaccgtaccgaggaaaagcacgtacatcagcgagatgatcagatcgagctgaccgatccggcgcagcagcgaaaacacccatatgccgactgtcgcgcccgccaggccgcccaccagaagcaccgagccgagcttcacatccagcgtcccgcgcctgaaatgggtgagtgcgcccgaaatcgacgaggccaccacctggttggcgccggtggcaacggcgacgacgggggggatgttatagaagatcagaagcggtgtgatgagaaagccgccgccgacgccgaacatgccggacaggaagccgacggccgcacccatgccgaggatgatgaaaatgttcaccgacaattctgcgatgggcagatagattgtcacagccgaccccgatttgcgcacgaccccacgggccgttgccttccccacatcttgtgcgaatgagacaccctagcctgaaatcgttgcgataggctttcgatcagcgacaccgtgtctcctcaatacgcgaagaattctgattaatcaggcttttttcaggttttgtgacaatcgcggcacactgttcgccgcaagtgccaaggagggtggtgaagatcggccgaacgtccgctggcacgattgaacggcgacgggcggctctctagattggccgcgccaacgagatacgggggaccatgtgagatcagcgattcgaatgttgatgctcggcgcgctgatcgcgtcggcgccggccgtggcatcggcgcagtggaagccggtcgaagacgtgcgcaactatgccataaccggcacgaccggcgccgagctctaccgctcgatcggcgagcgcggtcccgaggtcggcggtcaggcgcgggtcatcgcccacaccaccttcaagctgacatggacgcgcaaatacgagcggcagccggataacgcctgcaagctgacggtggccaggccgaagctgacgatcatctacacattgcccaagccgtcttcccggctctcgccatcggttcaggccggttggaacagtttcatagaagccatccgcacgcatgagcgcgtgcacgcagacaccatcgtcgacatggtgaaggagatcgagacgctgagcctcggcttttccgcgcccgacgatcccgactgcggcaagatacgcgccaatctcaccgagcgcctcggcgagatatccgcaaggcagcgccagcgcggccgcgatttcgatagagtggagatgagcgacggcggcactgtgcaggcgctcatcctgaaactcgtcaacggcccctgaaaaggggccgcgggcgtcagccgccggttgccgctgccatgtacggccagacttccagcgtgccgcgatagatcatgttcaaggcgacatagaggatgatcgccaggcctacataggcgatccagtgatagcggttgaggaggcgcgcgatgaagtttgcggcaatacccatcatcgcgatcgacaggatcaggccgatgaccagcacggtcggatgttcgcgggccgcgccggcgaccgcgagcacgttgtcgagcgacatcgacacgtcggcgatgacgatctgcgtcgcggcctggaagaaggtcttgcgcggcgcctgtgtgccctcgccattctgcccgtcggcgtcctgggcgctgttggcgcggatttcccgccacatcttccagcagacccatagaagcaggataccgcctgcgagcagcaggccgatgatttcaagcaactgcacggtgacgctggcaagcgcgatacgcagcacggtggcggcaatgatgccgaccagaatggccttcttgcgctgatcgggggcaaggcccgcggccgcgagcccgatcacgacggcattgtcgccggccaggaccaggtcgatgacgatgacctgcagaagcgccagcaagccggcggatgtgaatatttccatgatgcgataaatccctgcgctgcccgaagcctctccccggcgtcgccaaggcttaaatgatcggtcggcaatggatcaagtgctgtcggccagcttccgcaaaagatccgcgcctttcgcgtaaattcaggcggatgccgattgttccgtgtgaatattgcatcgcccctccggcatgcgccggtcgaagtcggccgcgatgtcggcgatggtgatggtgcgaagacgctcgagcagcaaggcctcggcctccttcagcgcatcgccgagtttcgcatcgacggcctgttccaccaggcattccggttgatcgaccgatggtccgatcgcaaacagcggcggcttgccgatcgcttcgtagatgtcgaacagcgtgatctggtcgaggccgcgggcgagctcccagccaccgccatgcccctgctcggatcggacatagccgctgtcgcgcaggcccgccatggtccgccggacgacgaccgcgttggtgccgagcattttcgaaatggtttccgatgtcgcgcgcttgtagtgccggtccatgtggatcagcacgtgcagcatacgcgaaaggcggctgtcgcgtctcattcgcttactcctgttgcgagcaatgtagcgccggcgatcatttgtaacaagataggttacgtgtcttgacgacaggcttttatgtaacatatgaagatgcgagagataggagcacgtcatgatttacgatgtcatcattgtcggcggcagtttcgccggccagtccgccgccatgcaactcgcccgcgcccgccgcaacgtgctggtcgtcgacggccgcaagccgcgcaatcgcttcgccgccgcatcccacggctttctcggccaggatggaaaggcacccgaggcgatcatcgccgaggcctcacgccagctcgccctctacaggacggtgacgcagttggagggcgaagcgaccgacatcggcagggaaggggatgtgttctcgctgacgcttgccgatggcgaaacgctgcgcgccgcccgcgtcgttctcgccaccggcgttcgcgatgagcttcccgatatcgatggattgcaacagcgctggggcaagaccgtgatgcattgcccctattgccatggctacgaagtcgccgaccagccgcttggcgtgcttgccggcggcccgatgtcggttcatcaggcgcagatgatcccggactgggggccgaccacctatttcacgcaaggagaatgggagccggatcccgagcaggcggcgttgctcgatgcgcgcggcgtcaccattgtccgcagcccggtcgtcgagttgctgggagaacagaccaagctggaagccgtccggctcaaggacggccgcgtcgtgccgctcggcggcctgttcgtcgcgccgaagacgcatctcgcgagcccccttgccgagcggctcggctgcgcgctggaagccggtcccaccggccccttcatccgcgtcgccaattttcagcagaccacggtcaagggcgtctatgccgccggcgatgcggcggtcgcgatggccaatgcgaccatggcctcggccgcgggcgtgatggccggcgttgccgcccaccgctcgctgatcatgccggactaaacccacaccggcgaaaggcatttggtcaggcgatcttcaatcaaacgaaaatcccccgcgaacgacggttcgcgggggatgtgtagcgagcccttgttcgatcaggccttggtcgacggcgccttgttgcgttccagcagcgccttgacggtcgcgtcgttgatcttgccgctcggctcctggccgatcgacttctggaagctcttgatcgcggcaaccgtcttggttcccatttcaccgtccggctggccggcgtcgaaaccgttattgttcaggatcgcctggatgttgcggatcgcccgcttcatgtcgacgctggatgtcttgatgccggcgccggtgccggcccattcgtcaggaacctggatgccgttggccttgttgtcgagcggctcggccttccacagatccgccttggcgcgggccttttccagctgatccggcttcatggcatttgccacttcgtcgcgcttctgcgaagcgtccttgtcgccgcccttggccgcgatcgcgaaccacttgtaggattccgtcaggtcctgcggcacgccgttgccgcgagcgcacaggatcgccaggttgaactggctgtcggtgatgccgaggttggcggcctttgtgaaccagttggccgctgccgaatagtcctgctgtccaagcgcgccggaggcgtagagcacggcgagattgtgcatcgcgttcgcgttgccctggctcgcggcttgttcgtagaactgcttggccttgtcggcgtcgcgggcaacgccgttgcccttctcgtacatgctgcccaggcggtattgcgccggggcgaagcccctgtcggccgccagctgataccagttcagcgcctggttcgcatcggcggtcacgcccgcgcggccttcgctgtagcgtgcgccgatttcaaacagcgccagcggatcgccggactttgccgcatccgaaagcgacttcggctggatcgtgtcggggacggcgatctcggcggtcggcgccgtcgcggctgccgatggtgccgggtcgttggcggtgaatgccgatgtgtcctgcggagcgccggaaggcgagagcgtgccgctgccgccgagcggtgcggcttcggtcaggcgctcgggcgtgccgggctcggtcggcgccggcgcggtgtccgccgtcaccggcggggtctgcgtcgagacggagggtgcctccggcgctgcggcgacgggcgccgaaggctctggcgcggtttcgctgtcggccggtagagttccgttctgtccgtcggtgatcgtcgccacttccgcggtcggcgcgggcgcgcccgatgtcagcgtgcgggcaagcggaaacgccatgatcgccagaagcacggcgccgacggcaagcaggatcggacgccggaagcgcgaaaacgcgctgcccttgcctgattccctggtcgggtccttgatcttcgccttcttctcgcccttcaccgacgcggtcttgccgctggggtcgacttcgagagcggcagcctgcgcggcacggcgggcggccgcgatatagtcggcgcgatccgtatcgctttccggtttcggattggtgcgggccgcgttctggctggcgcggacgcgttccaggatcttcttgacgtcgggtgcgccggaacccggctccagcggttcgttggccgcttccgccggcatcacgtcaacaggatcgatcgacggagccgggtcgatgacggcgcgttcgccggtcttggccttcttcgacggcagcaggcgcttgccgaggctgacgagcaggcttcccttggcggctgcggcgggcttgctggcggcctcgatggcaatggcgctggtgtcggatggagcgatcgcgggtgcggccggctctggcgtggtttcggtcttgcgcaccgcttccggcacgcgtgtgccgaacacggcgggcctctcggtctcttcggcgccggcctgcgtcatcgcatagggatcgacgttgaaatcgacgtcggcggtcggcatccgcgccggcggacgggccgtgcggctttccatgtcgtccagccggtcggcgatgtgcaccagcgtctcgtgcagcgcctggaaggtcttgtgcgtgcgctcctcgccgctgcggctcagatcctcgagatggcgcagatcggccgccagcgcgttgagcgccgacatgtcgacgccggcaccaccgcccgccagggcgccattgcgcgaataggcctcgacaaccgcttcagccgcctggcgggcggcttcgacgatatattcgtcgctggtcgccatatagtcttcgatcgcgcccatgcggcggtcgaaatcgatggcgatctcggtgctcgggcgcggctcgctcatcagcgcggaaagattggcgatctggtcttccaggttgcgcagcgcattcgcgtcggtcgcgggcgctgccgagctttcgtcgagacgcgcggcgatatcgctcagccggtcctcgatgcgcaggaatgcggcgtcatcgacaggggtctggatcgcctgctgcggctggaattccatctcgtcgatgcggcgggcgagatagtctaggcgctgcgccagcgcgtcgttgacggcgccgttctccagcgcgtcgatcttgcgcgagatatcggcgagcgcgccggtcagttccggctgcggagcggcccgctggctcttttcgagcaggaaggccagatgttcgagccgttcgtcgagccgcgacgtggcctcggcattggcgacttcctcgacacgcgcggtcagggcttccagccgttcggcgagaccgtcggccgggctcgcgcggcttgccacgctctggcccatcatctcgatctgttcggcaaggccgctcaaccgtccctcgaggcggtgcatggcggccgggtcgcccgacgtcgcggcgcggccggtcgcggcgatcgcgcggctgatttcgtcgaggcggctgtccatcgacgcgaactgctcggacatcgcccggtcatgcggctggatcatgctgccgaactgctccatcgccgtggcgatggagatgagcttgtcttcgagtgccttgacggccgggctctcgcccatgccgccgatatggcgcttgatatcgtcgaggcggtaggcaagcgccaccagctcttcctgcaggcctgacgtgtcgagcgcgtgcaactggttttcgaagccgtcccagcgctggtccatgtggcgcagcgaatcctcgcgcgccagcccgtccatcagcgagcgcaggtcttcgaattcgccgcgcaggccatgggcttccgaggtctccgagcgcgcggccagatggttgatgctgtcggcaagccggctcatgtcggcatgaatgtcttcggcgaaggggcggtcggcggccgtcgccttgatctcgcgcagttcgccgcgcagcgcgtccatttcccgggcaaccccctcggagatatcgcgcttcagatcctggcgcaggctgacgagcgcctgggcgatttccgtcatcgtgtcttcggcaccgcgctgatgggcgacgggtgcctgcggcggctggacggccgcgcgcggctgcggcgctggcgtgtgtgcgggtgccggctgggccgcataggccgtcgcctgttcgcggggtgcgtaaggagtggtctcgcgggcggcacgctcgcggcttgcgtccagcatgcgctggcgctggcggatctcggcgagcggatcgggacgcggctcggcggcggcgtatggcgcgcgcggggcgtagctggcgggggcgggttcgcgttcgggcgccggcgggcgattgcgctgctcgcgcaccccgctgccgatcaagccttcgatccgtgcttccaatccctcgatcgtgcggttcagcgcgtcaagcgacgccctgtcggaaggccggggagaatgtgatcgcgatccgttcatcttcttgctcgcttatctgttcgcaccctcgtcagggccgatcattggcttttccgtcagagccgcaacgaatgcggatcagagagcatcgtccataagaggatattcaattaggctttcctcaagctgtacgtgtggcgcgcattccataaaacgcgagacttgaaagaaggaatgcaggacaccaatgctcaaccgtcacctttcacggaacgtggtaaataacccgttaaccggtgtggagattttttaacttttgcgggtgccacggccgatttcgtgccgaaaccggtcttctaatgtacaagcaggctcaggcggataccaccgctgccgccgggtgtcggccgacaaggagggcaaggcgaagcgctagatccggcgcgccttgatcgtgttcatcacgaagctcgtctcgatcgtgtcgacgcatttcagccgcgcgatcttctccttgacgaagcgctcgtagtcgtcgagccccgagctcatcaccttgagcacgtagtcccgcgaccccgtgacgagatggcactccagcacctcgtcccattcgcgcacggcattctcgaacatccggatctcgtcctcgtgctggcggctgaggcggatcgaggcaagcgccgtcatcgtccagccgttgacggcgggatcgatcagcgcggtatatccctggatgatctcggcctcctcgagccgccgcaagcggcgcaggcaggcggaggcggaaaggccgacgcgctcggcgagttcgttgttggcaagccgcgcgtcgccggccagttccttcagaatccgcctgtccatctcatccgcaactttctgcatgcaatcttctccgctctcgcacgatgttgcttccaacatcgcagccgcgctccaaatagcaataacaccgcacgcatttcgatatattttgccgtcatcaatccatctttgaagcaggagacgatcatgaccgcgccgcatccctccaagacccatatcggcaatcacgccctgcatcccgaaacgcaaatgctgaactatggctacgatcccgaactctccgagggcgcggtcaagccgccggtgttcctgacctcgacattcgtgttcaagtccgcagaggatggccgcgatttcttcgattatgtctccggccgccgcgagccgccggcggggcagggggccggcctcgtctattcgcgcttcaatcatccgaatagcgagatcgtcgaggatcgcctcgccgtctacgagcgcacggaaagctgcgcgctgttctcgtccggcatgtcggccatcgccacgacgctgctcgccttcgtgcgcccgggtgatgcggtgctgcactcgcagccgctctatggcggtacggaaaccttgctcgccaagaccttcctcaatctcggcgtcgcggccgtcggcttcgccgatggcgtcgacgagaactcggtgcgcgccgccgccgaacaggcgatggccaagggccgtgtgtcgatgatcctcgtggaaacgccggcgaacccgaccaacagcctcgtcgatgtcgcgatgatgcgccgcatcgccgatgagatcggtagaaagcagggccacacgccgatcgtcgcctgcgacaacacgctgctcggtccggtcttccagcgcccgatcgaacacggcgccgacatctcgctctattcgctgaccaaatatgtcggcgggcactccgacctgatcgcaggcgcggcgttgggcagcaaggccgtcatgaagcaggtcaaggcgctgagaggcgcgatcggcacgcagctcgatccgcactcctgctggatgctcggccgctcgctggaaacgctgcagatccgcatggaacgcgccaacagcaacgcgcttgcggtggccgacttcctgcgcgcgcatccgaaggtcaggaagatccattatcttccgtatcacgagccgtcatcgccgctcggccgcactttcgccgcgcaatgcaccggcgccggatcgaccttctccttcgatatcgaaggcggccagccggcctcgttcaaattcctcaacgcgctgcagatcttcaagctcgccgtcagcctgggcggcacggaatcgctcgccagccatccggcgacgatgacgcactccggcgttccggccgatgtgcgtcaaaggatcggcgtcctggattccaccattcggctgtcgatcggcatcgagcatccagacgatctcattgccgatctgacccaggcgctggacgcggcctgatcgccgcgagtgagggaaaagcggcggctcaggccgccgccgtctccctgacgtcgtcgagcaggaagtgcacgaccacatatttggtggtgaagtggcgtccgccttcggtgacgttgtcgaccgtaccgccatcggcggggtgccaggcgtggtaatgcggattggtggtgatcagcgtcaccgccttgccgaggtttcggccgtcgagccggtagcgggcttccgccagcggccagatgcgctcgtaatcctccatcggaatgcggactttcaacgcctgtcggctgattgcctcgctgcgcgagccgtcctcatgttctatcgcgggaagatcgagtgttacttcttctgcattgtccagaacgaagttgaactcttcgggccacatccgtctcatgaaatcgctcctcctaagctttttcgtcggttagccaacgaagtttagcgcgtcttcggcaggaagcaaacgatacctgcggcgcgcccgccagacgaccggccgcaagctatgtcaagagtgggatgtgttactgctgccagcgaacggcgacataggtgcccgccgccttgccgtcgcgtccgtagctgatctcggcgccgagcgtcgtgcccatggcgttgatcagccgcgtcccgaggcctgttcccttcgggccgacgctgcggtcatagccgatcccgtcgtcctcgaccgaaagcaccgcgaaaccatcctccgtggcatcaagcacgacgcgcacctcgccggtgccagccgtgtaggcgtatttcgtcgcgttggtgacgagctcgatcaggatgacacccagcgcgacggccttgtcggccgtggtcgagatccgacacagctgcgatttcagcgtgatgccgcgggcgatcgtgctgctgccatgtagctcggccagcagcggtccgagatagacgtcgagctcgacctcgccgatgatctccgaggtgtagaggctgcgatgcacgccggcgatcgccgtgatgcggttctgcgtctcgttgagcgccgtcttcgtctcctcgctgccggcgatctgcatctgcatgcggatcatcgccgaaaccagcgacaggctgttggcgatacggtggttcatctccgcgagtagcagttccgcccgctccttggcgacgacgagctgccggtcggcctcctctttctcgctgcgcagccgggaattctccatcgcctggttgagcgcgctgatcagaagcgggaagaaatcgtccgtcgccgtcttcacgacgtaatccgcggccccgcccttcagcgcccggatggcgacgtcggcgtcgctcgatccggtgacgtagagaaccggcgtcggcttgccgatctcggcgatcgcctcgagaaagttcaggcccgtctggttctcgaaataatggtcgagaacgacggcctcgaaggtctctgccgcgaaaagctcgagcccgatctcgatggacggggcatggacgaccgtaaaatcgctgcgcgcaagcacccgcgttgcaaggcgggctagggccggatcatcatcgacataaaggatgcgcacagattttggctactcgttagggaacttgaatgacggagaagaacaggccgagattgcggatcgcggtggagaagccgtcatagtccaccggcttggtgatgtagacgttggcgccgagatcgtagcacttctggatttcgcgctcgtcgtcggtcgtggtcagaaccacgacaggcaggcggcgcgtgtgctcgttggttttgatcttctcgagaatgtcgagaccggacatgtcaggcaggttgagatcgagcaggatcagcagatagcgatccttgctgaccagcccgtcgcgatccggtccgaggatatagtcgagcgcgcccttgccgagcgtgaacggcacgatctcgttgttgacgccggcgcggcgcacgttcttttcgatgagacgggcatggccctcgtcatcctcgatcatcacgatcgtgacttcctgaccggttgctttcatagttccatactccgtacgatttttgtgaggtccgcgggcagcgtcagaatgaacgtgctgccctttccgagttcggattggaccgtaatgtctccgcccaaatttcggattaacgaacgcacatgcgcaaggccgataccttcgccgcgctgatcctgctcgccggcccggcgaaacagttcgaaaacccgttcgagatcattggtggcgatgccgcggccattgtccttgacgtcgatcctgacacgcccggggccatcgggataggcatcgacgtcgattttaagcggccgtcccggcatttgatacttgaccgcgttgtcgaacaggttgccgaagatctggtccagcgagaagcggtcgttgacgatattgccgatgcggacgcgggtttccgtcgtcccgcccgtctccaccagctggtggtggacattggcggcaaccgtgtcgatcatcgccttgaggtcgattctttcaggctgcagcttgcggcgaccgtcgcgggagatcttcaggatcgcattgatcagcgcatccatcttgcgggtggatgagcggatgaagccgagcgcttccggaaggtcttcctccaccgccatccgtgcatcctggatgtcctgctcgctcagcgtcttgttgtccgcgagcacataggtcgagaccgccttcatggccgtgtcgagttcgctcaggaagcccatgatgttgaccagcggcgccctgagatcgtgggtgacgatataggcgaaacgctggatttcctggttggcgcgcatcaggtcctcggtgcgctcgttgacgcgcgcctcgagcccgacattgagcagctcgacctccttggtcgcgagcgagagatcgcgcacgtgctggacgatgatcaggatcgccccgcccaggacgacaaggatcgccagcgcgccgccgatggtcaccatctgcagcgtgctggccgcggaaagctgcttttccaccagaacccgcaggcgaccgtcggtctggtcgaggaaatcgccgagaatggcacgaaccttgttcatgtagactagtccggcatcgtcacgcacgaccgccaccgcctccgcggtcttgccctcccgcgtcagcgcgaccgtcttggcaagttcgttcatcttgccgtcgatcgcttcgttcagcgcgtcgagctgcatcgcgtagctcggctgcgacttgacgttgtcgatcaggttctggcggcgtttgggcaggctttccagcgccgtcgtgtatggcgcgaggtaaacgatgtcgttcgccaaaagataaccgcgctggccggtttccgcgtcctgcacggtggtcaaaacgccgacgatggcgctgcgcacccggcgcagcgatgccgtctcgtcggaatattcgcggttcgcctggacaagccagagcgaggagccgacgatgccgagcaggatcaggacgcctacggcaagcatgatcaggctggagcggaggaaagcggcagtggaggtcatgcggcatccggtcattgaagtcgcgatgagttctatagagaagctcggcggaaagatagcaccctcacagtgtgtcgcgggccacccgctgacgggatgattgcgcggcaatgctgtcgtctgacgtcgcttgcgcgccgccccgcccggcatcgatctcacaaattcgcgatgcagcaaaatttgacgtttacgcaaacgtcaatattttgtaagacacatacacaggccggcctcgcccggctgacgaattggaggaattcgaacgatgccagtctacaaggccccggtaaacgacacgcttttcgtgctgaacgatgtgctgggtctggagcgctacaacaacctgccgggcttcgccgacgccacccctgacatgatcgaggcgatcctcggtgaatccgccaaggtcgccgaagaggtgcttttcccgctgaactattccggcgatcaggaaggttgcacgcgcaaggaagacggctcggtgaagacgccgaagggcttcaagcaggcctatgacgcctattgcgagggcggttggacggggcttgccgtgccggaggagttcggcggccaggggctgccctacacgctgcatgccgccgtcggcgaatacacctcggccgccaacatgtcgctgatgatgtatccgggcctgacccagggcgccatcgccgccatcatcgtccacggctccgacgagcagaagaagacctatctgccgaagatggtctccggcgaatggtccggcacgatgaacctgaccgagccgcattgcggcaccgatctcggcctgctgcgcaccaaggccgtgccgcaggccgacggcagctacaagatttcaggccagaagatattcatctccgccggcgaacacgacatgtccggcaacatcgtccacctcgttctcgcccgcatcgagggcgcccccgaggggaccaagggcatctcgctcttcatcgtgccgaagttcatggtcggtgccgatggcgcggccggggaacgcaacggggtttcctgcggcgcgctcgagcacaagatgggcatccacggcaacgccacctgcgtcatgaactacgacgaggcgacgggcttcctgatcggcgccgagaacaagggcttggccgccatgttcgtgatgatgaacgaggcccgcctcagcgtcggcctgcaggggctggcgattgccgagatcgcctaccagaacgccgccgaatatgcccgcgagcgcatccagggccgggcattgtcgggcgccaaggcaccggaaaagaaggccgatccgatcatcgtccatcccgacgttcgccgcgcgctgatgaccatccgctcgttcaacgaagccggccgcgccttcctgctctggaccgcgctgaaatcagacatcgcccaccgcgcgacggacgagaaggagcaacagacggccgacgatattctcggcctcgttaccccgatcctgaagggcgtgatgaccgacaagggcttcgaccatgcggtcatggcccagcaggttttcggcggccacggctatatcgaagagcagggcatgagccagtatgtccgcgatgcccgtatcgccatgatttacgagggcgccaacggtatccaggcgctcgacctcgtcggccgcaagctcggccagaatggcggccgcgcggtgatggcgctgttcaaggagatcggcgatttctgcgaggagaaccgcaacgacgagcagatgaccttcttcaccaagaacctgaagaagggcttgaacgacgcgcaggcgtcgaccatgtggttcatgcagcatgcgatggcaaagcccgacaatgccggcgccggttcgaccgactacatgcatctcttcggcctcgtcattctcggctatatgtgggcgaagatggccaaggccgccaatgacggactggccgccggagagaccgatcgagaggctttcctgcgcaacaagctgatcaccgcccgcttcttcatggagcggatcatgccggaaacgacgctgcgcaaggcgcgcatcgagaccggcgcggaaacgatgatggcattgagcgccgaggcgttttgaccactggttttctcttctccccagcggggagaagatgtccgaaaggatcaggcgcaactcgttgcgccggagatgagggggggagcgacgaaggagcgatcggccgtcaggccgagccaaccgccccctcatccgaccccttcggggccaccttctccccgtgggggagaagggaagcccgaggcagacaaattcacggcctaaccgccgctagggagacgagacaggatgaccgaagttttcatttacgatcacgtccgcacgccgcgcggccgcggcaagaaggatggctcgctgcatgaggtgccgtcggtgcgccttgcggcgaaaacgctggaagcgctgcgcgaccgcaatgggctgaacaccgaaacggtcgatgacatcatcatgggctgcgtcgatcctgtcatggaagccggcgcggtgatcccgcgcggtgcggccttcgaggcgggctattccatcaaggcgccgggcatgcagatctcccgtttctgcgcctccggcctcgacgccgtcaatttcgctgccgccaagatcgcgcagggcgccgatgacatcgtgatcgccggtggcgtcgagagcatgtcgcgcgtcggtctcggcatgtccggcggcgcctggttcatggacccgtcggtcaacttcccggcctatttcatgccgcagggcgtctcggccgatctcatcgccaccaaatacggcttcagccgcgacgacgtcgacgcctatgccgtcgagagccagaagcgcgccgccaattcctgggaaaagggctacttcaagaactcggtcatcccggtgaaggaccagaacggcctcgtgatcctcgatcgcgacgaacacatgcgccccggcaccgacatgcaggcgctggcatcgcttaacccgtccttccagatgcccggcgaaatgggcggcttcgaggccgtcggcatccaggcgcatccggagatcgagcggatcaactatgtccaccatgccggcaattcgtctggcatcgtcgatggcgccgccgccgtgctgctcggctccaaggctggcggcgagagcatggggctgaaaccgcgcggccgcatcaaggccttcgccaacatcggctccgacccggcgctgatgctgaccggccctgtcgatgtcaccgagaagctcttgaagcgatcaggtatgacgctcgccgatatcgacctcttcgagctcaacgaagccttcgccgccgtggtgctgcgctacatgcaggctttcgacattagccatgacaagatcaacgtcaacggcggcgccatcgccatggggcacccgctcggcgccaccggcgcgatgatcctgggcacggtgctggacgagctggaacgccgcgatctcaacaccgcgctggtcacgctctgcatcggcgccggcatgggcacggcgactgtgatcgagagggtgtagccccctcatccgacccttcgggccaccttctccccgtgggggagaagggaaggagccgcaacgtggacgatcctcctctcccctcggggagagggtggccgagcgtagcggaggccgggtgagggggcggtctggcacaacagagaattccacgggaagaggaatcccatcatgaccacctacaccaatttcaccgtcgagaccgacgccgatggcattgccctcgtcacctgggacatgcccggcaagtcgatgaacgtcttcacctccgaggtgatggacgaactgaatgcgatcatcgaccagacggtggccgatagcgccgtcaagggcgtggtcatcacttcaggcaagtcgagcttctccggcggcgccgacctctcgatgatcaaggcgatgttcaccttctacaacgaggagaaggtcaaggacccgtcgaccgccgcgcaaaaactcttcgatctcgtcggccgcatgaccggcctgttccgcaagctggaaacatccggcaagccctgggtctcggccatcaacggcacctgcatgggcggtgcgctggagatgtcgctcgcctgccacggccgcgtcgcctccaatgccaagtccgtcaagatcgcgcttcccgaagtcaaggtcggcatctttcccggcgccggcggcacgcagcgtgtcgcgcgcctggcggatgcccagtccgccctgcagatgatgacaacgggccagtcgctgacggcttcgcgcgccaaggcgatgaacctgatccaccaggtagtcgagccggatcaactgatccccgcggcaaagcagatgatcaaggacggcctgaagccgatcgccccctgggacgaaaagggcttcaaggcccccggcggcggcatatggacaccggcggctgcccagctctggccggccgcaccggcgatcctgcgccgcgaaacggcgggcaactatcccggcgcgcttgccatccttaaatccgtctacgagggcctgcaggttcccttcgatacggcgctgaagatcgagcagcgatacttcacgcaggtgctgcagaccaccgaagcattctcgatgatccgttccctcttcatctccatgcaggagcttggcaaaggggcccgccgccccgccggcatcgcaaaaacggagctgaagaaggtgggtgtcgtcggcgccggtttcatgggggcgtcgatcgcctacgtgaccgccgccgccggcattcccgtcaccctcatcgaccgcgacatggaagccgcgactaagggcaagtcggtctccgagggactggtgaaggattcggtcggcaagggccgcctgacgcaggatgagggtgcggccctcctcgcgcgcatcacgccgtcggccgattatgccgatctcgcggacgtcaacctcgtcatcgaggccgtcttcgaggatcgcgacatcaagaaggccgtgatcgaggctgtcgaagcggtgctacccgaaggcgcggtcttcgcctccaacacttcgacgctgccgatttccggcctcgcgaagaactcgaagcggccggtcgatttcatcggcgtgcatttcttctcgccggtcgaaaagatgatgctgaccgaagtcatcctcggcaaggaaaccggcgacaaggcgctggcggtggcactcgattacgtcgccgcgatcaagaagacgccgatcgtggtcaacgacacgcgtggcttcttcgtcaaccgctgcgtcttccgttatatccacgaagcctacgacatgctgatcgaaggcgtgccgccggcgatgatcgaaaacgccgccaagatggccggcatgccggtcggtccgctgtcgctcaacgacgaggtggcgatcgatctcagccagaagatcctgaaggcgaccgtcgccgatctcggcgaagcagctgtcgacccgaggcacctggcgctgatcaacaagatggtcgacgaactcgatcgtcgcggccgcaagaacggcaagggcttctacgactatccggccaaacccgccaagaagtcgctgtggccggagctgaagaccttctacccgcagaagaaggccgacgagatcgatgtcgaggtgctgaaacagcgcttcctcgtcaccatcgcgctcgaagccgcgcgcaccatggaggagggcatcgtcaccgatccgcgcgatgccgatgtcggctccatcctcggcttcggtttcgcgccctataccggcggcgtgctctcctacatcgacggcatgggcgcgaaaaatttcgtggcgctctgcgagaagttagcagcctcttacggaccgcacttcgcgtcgactgctctgctcagggatatggcggcgaagggcgagaccttctacggccgcttcgacccttatgccggcgcgaaggctgctgcctgaccgacctttccatacgcatgatcgggcgggcttttcagtctgcccggtcaccccaaaaattgatcgatccgggcatctctggtcgctaaagttgccttgccagagacacaattaccacgtaaaagcctcgcatcgatcttgctagatgaactttgttacggccgctcgtgctgttgctcgcgaacttcctccaaaatcggtttccatcgcatgctggctttgttcggtgtgcaccatctatgtacgatttataaaaggatatcgtcatgagcacaggtactgttaagtggttcaacgcaaccaagggctacggcttcattcagccggacgacggttctgccgacgttttcgttcacatctctgctgttgagcgcgccggcatgcgcgaactcaaggacggccagaagctgtcttacgagctcgttgccgacaagcgttcgggcaagatgtccgcagaccgtctgcaggctgcttaagtttcgaatatatcgtttccggttcgccgggacggacgaaaggtcgggttcgcccggccttttttgttgcccgattttcgggttcaggcggcgatccgctgcgctctcgcgcgctccgcccgcaagccgagaaagccgatccaggtgacgagaatgatcgccgtcgcgtagatatccgtggtcagctgatacccgagcgacttcgccaggaaaccggcgagaatggccggcaggctgaaggccagatagctctggatatagaacgccgacaagagttcggcgcgctcgtccggcttggcaagtggcatgatcgtgcccatcgcgcccaggaaattcgtgccgaagccgacgccggtcagcagtgtgcctaaaagcagcagcggcacgctggcaaggtgcacgcccgcaaccaccgtgagcacgccaagcgtggtcgccagcgtcccgaaggcgaggttggcgttggccgatttggcgcgcctcagatagacggcgaccgcccccgataccatcagcgccgtcaccaccgatccgcccgtcagcggcgcatggctgcctgtggtgctgaccaccagagacggcacgagcgagagatagaagccgcccagcgtccagttggcgatgttgatcggcgtaacgagcgccagcggccgccgcacctgcggcgggatggcgacgcgcggcttcagcgaagcccatacgcccggccgcgtggacgcggtctcgctggttgcccagatcgcgccggcctggatgacgaaggcgacgaggaggatcacgtagacgagatgcagcggaaagggcccatactggatcagcgcgctggttccgaaagcgccgatcgccatgccggatagcggcgcgatcgagttcaccagctgccccttggccttgtcgacatcgacgagcgcagcaccgatcgaagcgccggcgatgcctgtcgccagcccctgcatgatccgcgccgcgattagccagtccggtccgctggcggcggcaaacagcgccatggcgatgatctcgagcacgagcgccgaaaagatcaccggcttgcggccgagatggtcggagatcgagccggcgatcaacaaggcaagcagcagcgcgaaggcataaacggcgaagatgaccgtgatcagcacgggagaaacggtgaaggcttcctggtagatccggtaaagcggcgtcggcgccgccgaggccccgaagaaggtggcgagcgtcaccgcgtgaaaacggatggggtttgacttcgtctctatggatttgccgggcgcgggcatatataagctccttaaagctaagtcgttgcgttagtccgatgtagggtaggcgcacgctaaaagcaaataatttgcgttaatggatcgctcaaagtttttgaaccatggcgcgctcgggaggccgaaggtcggataaccaatgccagcaaaagaaaatctccgccccggcgggcgcagcgcccgcgttcaggcctccgtccacaatgccgtccgctcgcttctgaagacgatggaccgcgccgacgtcaccatcccgctgatcgcggccgaggcaggcgtgacgccgtcgacaatctaccgccgctggggcgagctgcaggagttgctcgccgatgtcgccgtcgagcgccttcgccccgacatgctgccgatcgataccggcagcgcacgcggcgatctggaagtgtggacggagcaatattgcgaggaaatgtcctctggcatcggtcgcgacatgatgcgcgacgtgctggccgtccaggacaacgccaacgcctgcaagtgcgatgccttcacccgcgaacagatcgcgttgattgctgagcgcgcgcatgcccgtggcgaggcgtttcccgatatcgatgcggtcatggacggcgtcgtcgcccccatcatctaccgcatcctctttggcgaccagccctcgatcgagcgcgttcgcgaccttgtgacggatgtgctggcgcgcgagcctattcggcagccgcagcccgcttctgcgccgatatctgggtgatgtaggcgcgcagcgtggcggggcgcaccggcttgtgctggatgccgatcccgtgccgctcggcgtccgcgcgcacctccagcgtccggtcggcggtgacgacgagaccgggaacataggtggcgaagcgctcgcgcacggagaggatcgcggccaccccggtcccgtctccaagatggtagtcggcgatgacgagatcgggcgcaccctcacggacatcgagcgccgcgacgccgacaagcgaatccgccgactgcaccgcgcagccccagccgctcagcagcagctgcatcccctcgaggatatgcgactcgttgtcgatgcagagcaccttcagcccttccagattccgcgccgagcgctcggcgggcgcagccgtgatcggcgcttcggtcaccggcgagatgtcgcgcggcatgacgatgcggaagtcggtgcccttgccatgcgtcgaatgcagctccaccgggtggctgagcacgcgcgcgatgcgatcgacgatcgatagcccgagcccaaggcccgatgcggtcctggcgccttcgtccagccgcgcgaactccttgaacacggtgcggaatttcgacggcggaatgccgatgcccgaatccatcacctggatgacgacctggttgccgcgccgccgcgcacccaccagcaccttgccggtcagcgtatatttgatcgcattcgacaccaggttctgcaccagtcggcgcagcagattggggtctgaccgcacgcgaagagacgtcggcatcaccaccagtttcagatgcttctcgcgcgcaatcggcgcgaagtcggtctggatgcgctccagcagatcggcaagcggaaccgaggcgaggcgagggcgcatcgccccggtgtcgagcctggaaatgtcgagcacggcgcccagaatgctctccaccgattccagcgccgaatcgatgttacgcacgatggcgctgctctccgattgccccatccgctcgacaagcgccgaggaatagagcctggcggcgttaagcggctgcaggatgtcgtgcccggcggcggcgaagaagcgcgtcttgccgagattcgcttcgtcggccgaggcgcgcgcttcgccgagctcgtgattgacacgggtaagctccgcggtgcgctccgccacccgctgctccagcgtctcgttggcctgcttcagcgcctggtcggcggccacgcgctgggtgatatcggtgaaggtcgcaacgatccccttgtcgggcatggcgttggagcgcacttcgatgatgcgttccccgcgcccgagcaccagcgcgaagggtttgtccagcgtcaggaaatgccggaccgtctggctgacctcggagaccgggacatcgccgcgctggctgaggatggcgacgatatcggcgagcggaaacccgacctggccggatgtctcgggcagatcgagcagctgccggaagcgccggttccagatcgtcaggtggttggagctgtcgaacaccgcgatgccctggtccatctgcgacagcgccgtctgcagcatgtcctggttatactgcagcgcctcgctcgcctggtcgagcagccacgcggtgtctgccgaggcatcctccaccttctgcaggatgagcgacagcaccagccgcgccgacgacgagccgatggcgctgccgagcagctgctcggtgaaatggatgagcgccatgtcggccggctggtcgtcctccagcttgcggccggagttctgctggtaggtctggaacgaccgctccatcctctcttcgccgagatagcgcgagatcgtcgccttcaggtcgccgacgctgatccgcgttttccagccgcgcgtggcgaattgcgagcgcgattgccgcttgacgaagatgccggcctggatgcgctcgagcggccgcgcattgcgcgtcatcgagccgacaatgaagaacccggtgttgacgatcaggctcatgaccgtggcgttcaccagcggatcggcattgtcggtgaacacgctggtgccgggaaagacgaagcccagcacggcgctcgccaccgccgaataatccggtccgccaagcgagggtagaaagagcaggtagatccagatcacgaagccggaggagaggccgaggatcgcgccgcgcgcattggcccgccgccagatcagtccgccgagtagcgaaggcgccatctgcgcgatggcggcgaacgatagcaggccgatcgaggccaggcccgtggtgctgtccgtcgagcgatagtaggcatagccgagcagcagcacggcgaagatggcgctgcggcggatgttgagcagcgtcttggcgaaatcgtcgcgctggccgccgcgcccggcaagccgttggcgcaggaagatcggcatgacgatgtcgttggagaccatgatcgacagcgccaccgatgcgacgatcaccatcgccgtcgccgccgagaaaccgccgatgaaggtgatcagcgacatcaagggcatctgcccgacgatcggcagcgacagcatgtagagatcggcattgccgttgccgccgaaggtcagcaggccagcaatcgccatcgggagcacgaagagattgatggcgacgaggtagagcggaaacaggaaccccgccagccgcagctccttcgccgtccggttctcgaccacagtcacatgaaactgccgcggcagcatgatgatcgcgaaggccgaaagcacggtcagcgtcagccagcggctgatcggcgtctggtactgcagcgccgaaagtaccagctcgttctccgacgccttttgccagaggtcggccggtccgtcgaacaggaaccacacgacgcagacccctgccgtcagaaacgcgagcagtttcaccaccgattccatcgcgaccgcgaggatcaacccgtcctgatgctcggtcgcatcggtatggcgggtgccgaacatgatggcgaagcaggcgagcaccagcgtcaccagaagcggcaggtcgaggaaatagagattgccgctgccgatgccgtaatccgacggattgagcatcgccgtcacggtgctcgacaccgctttcagctgcagcgcgatgtagggaattgcgccgacgagcgagatcagcgccacgatcgtccccaccgccgagttcttgccgtagcgcgccgaaatgaagtcggcgacggaagtgagcttctccgtcttggcgaggtcgatgatccgccgcagcaccggcatcccgagcgtgaacaccaggatcgggccgatatagatgccggtgaattccagcccgcgctgcgaggcaaggccgacaccgccgaaataggtccacgaggtgcagtagatcgcgaggctgagcgcatagacgacgggccggccgttgtcgggcgcgccgaaattcctgcgctgccggtcgccgtggcttgccacggcaaacagcagtaacaggtagccgaacgccgatgcgagtatgacccagcctggcagcatttctcctccgccggcgtcccatgcgccggccctcccggatctcgaagcctacggcaaatcggcgcctttgagaattgccggcgtctaggtcttaagtcaaagacgcgggcagcaaatgaataattcgtaatttgtaattgaataatctcgacgaagatgtagctaataaaaacaacagcctgcaatcaaactgcatcagagggagacagatcgcatgctcaacgagttcaaagcgtttattgctcgcggcaacgtcatggaccttgccgtcggtgtcatcatcggtggtgcgttcggcggcatcgtcaaatccttggtcgacgacgtcatcatgccgatcgtcggtgctctcttcgggggcttcgatttctccaactacttcatcggcctctcgtccaacgtcaatgcgccgacgctggccgctgcccgcgcgcagggcgccgtcctcgcctacggcagcttcatcaccgtcctcatcaatttcctgatcctcgcctggatcatcttcctgatggtgaagggcgtgaacacgctgcagaagcaggtcgaacgccagaagaaggtcgctccggaagaagcaccgccgccgccggccgacgtcgcccttctcaccgaaatccgcgacctcctggccaagcgtccgacggtctgatgggcatgcgagccctgccggatgaggcggggctcacccatcacggaaatcgatcggccatcacgtattgtcatgggattcgcccgctcatttgttttatgtaggcgaaaaccggagtgatgcatgtcgatcgtcaatagcctcagcccgcgcgccatccaggcacctgaaagcgggatcgtcgaagtcgtcaactatgcccgtggccgcgatggcctcttgccgctctgggtcggcgaaggcgatctgcccacgcccgatttcgtcaatcaggcggccatgacggcgctgtccgccggcgagaccttctacacctaccagcgcggcattcccgagctgcgccaggcactctccgattactacgcccgccacttcggcattcagctgccggtcgagcatttcttcgtcaccggctccggcatgcaggcgatccagatcgccgtgcaggcgatgacctcgccgggtgacgaactggtctatctgacgcccgcctggccgaatatcgccgccgctctcgagatcgccggcgctcgctccgtcggcgtgcagctcgacttcgaaggtggaaaatgggccgtcgacctcgaccgcatcgccgccgcgatcacgaacaagaccaaggcgctcttcatcaacacgccatccaacccgaccggctggaccgcgacgcgcgaggatctggccgccatcctcggcctcgcccgcaagcatggcctgtggatcatggcggacgagatctacgcccgctactatttccccggcgaccgcgccgcctccttcctcgatgtgatggaagtgggtgacaaggtcatgttcgtcaattccttctcgaagaactggtcgatgaccggctggcgggtcggctggatcgtggcgccgccggagaccggacaggtgcttgagaacctgatccagtattcgacctcgggcgttgcccagttcatgcagcggggcgccgtcgccgccctgaacgagggcgatgccttcgtgcaggccaacatcgacaaggcaaggcgctcgcgcgacatcctctgcgacgcgctgattgcgaccaaccgggtcgagacgctgaagcccgatggcgcgctctatgccttcctgaagatcgatggcgttaccgacagccgcaaggcggcgatcgatatcgtcgacaagaccggcgtcggcctggcgcccggaaccgcgttcggccccggcggcgagctgtttctccgcgcctgcttcctgcgcgatcccgcccagatccagacggccgccgacaggctctgcgactatatcctgaagctctgaacagggagcatccatatgtccgaaaagatcaccgccgaccatctggaaggctttctcggcaatcgccgccttatggagcagctggccttcattctcgaggtcgagaagctgaagaccatcctgcgccgcacgctgctgctcgatcgctcgcgtgtcgaaaccgacgccgagcacacctggcagctggcgctgatggcggccgtcctcgccgagcattcgagcgagccgatcgatctgctgcgcgtcctgaagatgctgctgatccacgacgtcgtcgaaatcgatgccggcgacaccttcgcctatgacgcggtcgcccgcgccagccaggccgagcgcgagcttttggccgccgaccgcatcttcgccctgcttcccgccgatcaggccgtcgagttccgcgcgctctgggatgagttcgaggagaagcgcaccagcgatgcgcgcttcgccaatgccatggaccgcttccagccgctgctccacaatttcttcaccggcggcggcacctggcatacggcaggtgtcacggagccggacgttgtaaggcgcatggagccgatcgccatcgcttcgggcacactcggagacctcaccgaacggctgatcgcgctcgccgtcgagcagggcttcctggctccccgggccgcagcggaaccgcgcgcctgaactctcgatggggccgaaacggccacatcgataaaattctagcgaacccgcaaatcagcccctaaccacaccggcaaacttcgcccctgcggatacaccgctcgggccgtttattcgaatttcggaaaggaaagccgcgtcagatgcccgtgtgataaaacgggagtgtgggacatggcaattctggtgacgggtggtgccggttatatcggcagccatatggtctggacattgctggatgccggtgagcaggtcgttgtcctcgatcgcctctccacgggctttcgatgggccgtggcgccggaagcgcgcttctatctcggcgatgtcgccgacaccgaattgctcaagaccatctttatcgaaaacgacatcgaggcgatcatccatttcgccggttccgccgtcgtcccggcctccgtcgccgatccgctgtcctactacgacaataactccggcaagacccgggcgctgatgagcgcggcggtcagcgccggtatccgccatttcgtcttctcgtccaccgccgccgtctacgggccgcagccgagctcggccccggtcaaggaaaacgcgtcgctcaacccggaaaatccctacggccagtcgaagctgatgaccgagttcatgctccgcgatgccgccgccgcctatgatttcaactatgtggccctgcgttacttcaacgtcgccggcgccgacccgctcggccgcgccgggcagtcgacctcgggcgcgacgcatctgatcaaggtcgcctgcgaagcggccctcgggcgccgcgacagcgtcagcgtctatgggcttgactacccgacgcatgacggcaccggcgtgcgcgactacatccacgtcagcgatctggccgaggcgcatctgagagccctgcagcacctgcgccgcgagcgcggctcgctggtcgccaattgtggttatggcgccggatattcggtgctcgacgtgctgaacatggtcacgcgcctgcacggccaggccttcaagatccacatggcgccgcgtcgtcccggcgattccgcaagcgtcgtggccgatgctactctggcgaaccgcgtgctcggctggactccccgatacgattcgctcgagaccatcgtgcgcagcgcgctcgattgggagctgtcgttgatgcgccgtgatgccgaggatctgcaggggctgcatcgcgtacttgccgcctccttctgagccgtcgtcaggcctgttcaccaccgagctcatgctccgccgagactgtcgcagtcttgcgaccgaacgcgggcacgagtgccttcctcacaggacagccatcgactatccggccgagcgcgataagtttgtgtacaagcagcgcctcgcgctgacagcatgagcgcggagtagcaatttggcgtggccgcatgatcgcggttaagccgcaaggaggcccgggatgcacgacaaggtcgatcagcgcgaggttatcgtcgagcgacagggttccgctggcatcatccgcctcaaccgcccgagggcgttgaacagcctgacgctcgatatggtccgctcgatcgatgcggcgctcagtgaattcgccgccgatgccgatgtggcgaccgtggtcgtcatgggcgagggagagcgcggcttctgcgccggtggcgatatccgcgcgctgcacgagagcgggcgtgccggcacgtcgctggcggaagacttctggcgccacgagtttcatctcaatcaccgcatcgccttctatcccaaaccctatgtcgcgctgatggacggcatcaccatgggcggcggcgtcggtctttccgcgcatggtcgccaccgcgtggtcaccgagcgcacccgcttcgccatgcccgagacaggcatcggctatttccccgacgtcggcgccacctggctgctgccgcacgccttgggcgaagttggcatctggatcggcctgacgggcctggaggtgggcgcggccgacgtgattcatgccggcctcgccgatgtgcaagttgcctcgttccagctgccggagctcgtcgatacgctggccgggctatcgcgtggcgccagctcgcgcgatgtcgatgtcgtcctgaagaacctgtcgaccgatccgggcaagggaccgctcaggctgaacagcagcctgatcgagcgcacctttcgcttcggcacggtcggcgaaatcatcgccgccttgaaagcggaggtttcggatttcgcgactgaaacgctgcgcgccatcgagctgcgctcgccgaccagcctggcgctgaccctgcgcctgttgcacgagggcaagcagagccgcagcctgggccagtgcctgcggcgcgagttcagcgcctgcctgggcatcctgcacagtcccgatttctacgagggcatccgcgccgccgtcatcgacaaggaccgcaagccgaaatggatgcccgccacgatcgaggcggtcgaacccgctgagatcgagcgcttcctgcgcccggcggaaccgccgctggcgctcgtctaggcaggcgcggtgcttacatcgggaaatccggaatagtctcgcgccgggtcagcttcagcgtccggtcgggctgcaggatgtaggtttccagcaccttcgttccggttgaatcatagaaggaattatggacgacgctgcccggcggcgatttcgtcagcttggtgcgcggctgcccgccataggtgatgcttccggggatgggctgcacctccgccgtctcgctggtcgtgcagccggccagaagaaatgtcgccgcaacggccgatatcaggattttcatggcgatcacccaaaatgtctatgctgttgatatggctcgcttcgcttcacgcgccaagaggtgttcggattttcttctcgaaaatactcgaactatagcgcgcgcgcactgcaacgaaatgccgcgttgcagcgttaaacagcaggacaaatcgctttggaggcgaagatggtacagctgttccagacctttgccggtcatgaggatcactgcgaacaggggcacagccagtcgtctatgcgggctgccgtcgaaagcgcgctgagcgccgatgccgagctcgactgcaccgagatcacggtcacgatgcttgggccttacgccgtgctcgaggggttcgcgcacagtgccagcgacatcgttcgcgccacgatgatcgccgaggacgtcgtgggaaaaggcaatgtccagagccggatgctgcggcgctgatgattggtgtttccggtttgtcgtgcactggtggggcaatactgtgagcgagaagtaaaaaacgttaacgcagttaaaagtggccacgttcttgcggaactaaactcgcggctggtccgttacttgcgtaaatcaaacatgggagaatggcatgaagcgctttcttcgagttgggatgccttctttagcgctgatggttggcgcatttgcattgccggccttggcttcactggagatcgacagcgactattccgcgctgcagcgtgatgatgtcgtggtggcgcaatatggcgatccgatcgcctgcgtaccctccgccgcacgttacgttccgtcgttcattcgcgccggtgacggcacgatcatcggcgtgggttatgtggaagtggcaagcgccgatacgggatgctgatatcaggtaacgctcaattaaccagccggccgtggcgcatcgccagacgatgcgcggacgtgaggcgcgtattgccgcccgttcaaacatcattgtctaagctgttgttttgaaggagatcgtacgaggcccgcctgcgcttttggcacagagggtgacgagcctctgaccatcatcatgatggctgagaatgttctagtgatcgttgtgtcaccgtgacaaccggcttcgcgcggctgcccccgacaagctcccgcaagggttaagcaaaaatcaactctgttttatttcgagccaattgtggaccgttacgatcccgatcgggcctcgaaccgataccgatttgatcggctgcgctcgttcagtggacgtgaagccttgcttcttccgccgccgcgacgaattccgcgcgtgcttcttccacgcttttgcggccgtccagcgccgcccggcatgtgctgcgggcctttagatagcgcaggccgcgaacattgggccagagctccgtaaggcatgtcagtgcgtcgaatgggccggatatcgtccgcgcgcccgtcgtttcgaagccgacatggatagggtcattccacttttcgcttgccatttgcgcactcctccattgctcacgccataactctgcagcgttctgcctgctcctcccgcaaagcagtgtgcgagagcattttagcgataattcacaaacccgcaaatgggaaaagacgcacgcattcggcggaccgaaccaaaggcgtatccggcacaagcacccggcccgttcgaccgagtgcctgcaacatccgtcaagcctgcgcgtttagcggcagacccgtgtggtctcggtcacgagcttgccgtggctgcggtacttcacggtcttcatgcggcaattggagcgcgccgaatgttggcgataggagcggttgtaataggggcggggcttgtagcgctcgtgataaccgggctgaccgattctcaccgtcacgctatcggcaaaggatggcattgccgttgcgccgaacgatgcgatagccacgacggcggcggtaataagcttcttcatgctggtctccattcataacagcgttgacgaaacgttcgtatcgataatttgttcgatacgaataataagcgcagcatgaatgtgagctgagaggcatgttcatgtccgggtcatcccggcggcgaacagcttttattgagcgatggtatagacgaacatggctctgtagacggcgatggttccgatgacggcggtgaaaacagccaggaccatggcaatgaggataacggccttcgtcaccttgctgttctgctggtcgttgtcatcagtgctcatcgtcgtctcctgctgggtcgccatgccctgtcgcttatgcggccggagaggcgtttgaatatcggcacctcttagccagtcggccgcgctttcgcaaaccgggatatctctttcagccggaggtccgttgcacgtcgcaattaccgcaaatctcgcaataatgccgtagcaaaagggctttccaccaaaatggcccggctgtccggccgaacaggcgcggacctgcgtcgatcggacgcaatacggaagctggtatttaccggggagaaaactggtgctgccgagtgggattgaaccaccgacctcacccttaccaagggtgtgctctaccactgagctacggcagcgaggaccagacgctgggcaaccgaaccggctgcgttgcgtgaacggggcggctattgccacagcttcgggacaagcgcaagccgcaatttcaaacttctgtcagtttcacgtcgccacttttggattgccgcgaattcgggtaagccatgaaacatgaccgaagacactgaaaatgcccgcaagggccgcaaggacgcgatcgagcagcaggcgaaattgcgccgcgatcgggccgccgaaaaattgcgggaaaatctttcgaggcgcaaacagcagacgcgcgcccgccgttccggccaggccgacgagacaaatgggctgcctgccgcaaaaatggacgaatcgtaatgttccgtctgcttcgaattgaagccttcgcggatttcgtctaaagacctgcatccttttaaaagacagagtttcagaaaggcgggcatcgcccgtaatcgcctatggatcgtatcagaattgtcggcggtaatgagcttaacggcatcattcccatttccggcgccaagaatgccgccttgccgctgatgatcgcctcgctgctgaccagcgatacgctgacgctcgaaaacgtgccgcacctggccgatgtcgagcagttgctgcgcatcctcggcaaccacggcgtcgatgtttcggtcaatggccgccgcgaacgccaggaagacagctactcccgcacgatccacttcacctgccgcaccattgtcgacacgaccgctccctacgagctggtctcgaagatgcgcgcctccttctgggtcatcggcccccttcttgcgcgtgaaggccagtgccgcgtttcgctccccggcggttgcgccatcggcacgcgcccggtcgatctcttcctcgacggtctgacggcgctcggcgcgacgctcgatatcgacagcggctatgtcaacgccaccgcccccaagggcggcctgatcggcgcaaagtacaccttcccgaaggtctccgtcggcgcgacccatgtcatgatgatggccgccacgcttgcccgcggcaccaccgtcatcggcaacgccgcccgcgagcccgaggtcgtcgacctcgccaactgcctgatcgccatgggcgccaggatctccggcgccggcacctcgacaatcaccatcgaaggcgtcacctcgctgtcgggcgcgcgccaccgcgttctgccggatcgtatcgagaccggcacctacgccatggccgttgccatggccggcggcgatgtcgtgcttgaaaacaccgatgtggcgctgctcgacaccgcgctcgagacgcttcgccgcgccggtgccgagatctccgcgaccaacaacggcatgcgcgtccgccgcaatggcgccggcatccgcccggtcgatatcgtcaccgatccgttcccgggcttcccgaccgacctgcaggcgcagttcatggcgctgatgacccgctccaccggcgtgtctcatgtcaccgagaccatcttcgaaaaccgcttcatgcacgtgcaggaacttgcccgcctcggcgccaagatctcgctgtcgggccagacggcgaagatcgagggcgtgccgcgcctgaagggtgctccggtcatggcaaccgacctgcgcgcttccgtgtcgctcgtcatcgccggccttgcggccgaaggcgagaccatggtgtcgcgcgtctaccacctcgatcgtggcttcgagcgcctggaagaaaagctcacccgctgcggcgcggtggtcgaacgcgtcagcgaataagcgcaactgtagacgtaacgagacaaagggcggtcattcgccctttgtccccgttgcgcaacgggcgttagcgccttatgtcccttgttgctacggcaccgccattccgcggcgccgggtatcgccatcccggcgatatcggagacaacggggtgctgcctgaatgaccgacctgaagcttgttgcgctggatagcgaagaccttgccatcgtctccgcgcatacgcaggatagcgtcttcaaggtcgcggatctctcctggtcgccgcgcgaccaccagttctccatcgccgccaatcgtttcgtctgggaagaagcggccgccaagcgcaagggcttcgagcgccgccgcgccgccatcgtcttcaagcgcgtgctggccgtgcgctccgtcggcatcaatcaaaagaaccgtgaggacgtcctgtcgctgctcgccatccgtttcgagcagaagggggaggggcccgagggcaccgtgcagatcgatctggccgccggcgccaccatcgcgctcgatgtcgaatgcatcgaggttcagcttgcggatatcggcggcgcatgggaaaccgcatccaagccgcgccatcccggcgcctgaatacgcatttatcgaagcataccgagaggaattgacgcgtggcaatctggttggatcaggcatcggacgatttcggacagcgtttcgcggcgtttctgacgaccaagcgcgaaatgtccgaggacgtgaacaccaccgttcgcgccattatcgatgatgtgcgcgcccgcggcgatgcggcgctcgccgaatactcgcgcaagttcgagggcatcgatttcgccgagacgccgatgcgcgtcaccgaagcggaaatcgacgcggccgtcgaggccgtgcccgccgaggtgctgggcgcgctcaaggtcgccgccgtccgcatcgaatcccaccacgcccgccagctccccaaggacgatatctacgaagacgccatgggcgtgacgctcggctcgcgctggacggcgatcgaggcggtcggcctttatgttcccggcggcacggcaagctatccgagctctgtgctgatgaacgccattccggccaaggtcgccggcgtcgatcgtgtcgtcatcgtcgttccggcaacgggcggccaggtcaaccccgccgtgctcgccgccgccaagcttgccggcgtcaccgagatctaccgcatcggcggtgcccaggcggtcgcggcgctcgcctacggcaccgagagcatcgcgccggtcgacaagatcaccggccccggtaacgcctatgtcgccgccgccaagcgccacgtcttcggcactgtcggcatcgacatgatcgccggcccgtcggaagtcctcgtcatcgccgacaaggacaacaatccggattggatcgcggccgacctgctcgcccaggcggagcatgatgtcagcgcccagtcgatcctgattaccgacgacgcggccttcggcaaggcagtcgaggcagcagtcgagcgccagctgaagacgctgaaccgcgccgacacggccgccgccagctggcgtgatttcggcgccgtcatcctggtcaagcagatcagcgacgccatcccgctcgcaaaccgcatcgccgccgagcatctggaactcgccgtcgccgatcccgatgcgctggtcgacaaggtccgcaatgccggcgccatcttcatcggcgcgcatacgcccgaagtgatcggcgattatgtcggcggctccaaccatgtgctgccgacggcccgctccgcgcggttttcgtccggcctctcggtgcttgatttcgtcaagcgcacctcgatcctgcgtctcggccccgaacagctgcgcaccctcggcccggccgctatcgcgctcgcggtatccgaaggtctcgacgcccacgcgcggtcggtcgcgatccgcctcaacctggaacggtaagcgatggctgcgggcgacttccggctttgcgacgtcgtcctggacgacaccatcggccgatcgacgcccgatgtcgagcacgagcgcgccgtcgccatcttcgatctcatcgaggaaaacagttttacgcccatcggccatgccggtggcccgtaccggctgaacatttcgctcgtcgatgccaagctggtctttgcgatcacgacggaaggcggcgaggctgtcgccacccatatcctgtcgctcaccccgttccgccgcatcgtgaaggattacttcatgatctgcgagagctattacgaggcgatccgttccgcctcgccaagccgcatcgaggcgatcgacatgggtcggcgcggcatccataacgaaggttcacaaaccctgcggaaccgattggacggcaagatcgaggtggatttcgataccgcgcgccgcctgttcacgctggtctgcgttctctactggcgcggatgaccgggatggacgagctcgaaccagcaggcgcgagggtcaagccgggcgcgattttgttcatgtgcggcctgaatgccatccgctcgcccatggcggaggcgatcgctcgtagcatgctgcccgccaatacctatatatgctcggcgggcgtccgtgcgggcgagcgcgatccctttgtcgatgtggtgctcgatgaaatcggactttcgctcgggcgccatctgccgcacacgctcgacgatctcgaagacgattatttcgatgtgatcatcacgctttctccgccagcccatcacgcagcgctggaactgacgcgagcgagcgccgtcgaggtggtctactggccgaccatggacccgaccgtcgtgcagggcacgcgggagcagattctggagagctatcgcgaggtgcgaaatcatctcgccgagcttatcgagaaccgtctattagaccgaagtggtatcgccgcgcagtccgcatgaaacaaataaaggaaacgcgatcaatttggttcacaaacctctgttgattgtgtagtttccgcccaaattttgaggcggccccaatcttggccaatgccgccatctcaaccgacaggaagaaaacacctatatgcctaaagaagaagtcctcgagttcccgggtatcgtcaccgaacttttgccgaatgcgacgttccgcgtgaagctcgaaaacgagcacgagatcatcgcccacacggctggccgcatgcgcaagaaccgtatccgcgttctcgccggcgacaaggttcttgtggaaatgactccatacgacctcaccaagggccgtatcacctaccgcttcaagtaagcttgagctgaaagcccccagggctttcgcttccgtctgcccggtggtcgaggttccatggcgctcaaatacaagctcattctggcttcgggttcgccccgccgcgttgacctgctcaaccaggcaggcatcgagccgtcgcgcctgatgccgatggatatcgacgagacgccgaagaagtcggagcacccgcgctcgctggcccgccgcctgtccacggaaaaggccgaggcagcgctggccgccatcaagggcgacatgacctggaagggcagctatatcctcgccgccgataccgtcgtggccgtcggtcgccgtattctcggcaaggccgagttcgccgacgaggcctcggcctcgctctacctgctctccggccgcagccattgggtctacaccggcgtctgcctggtgacccctgatcgcaagatccgccagaagatcgtggaaaccaaggtgcgcttcaagcgtttgtcgggtttcgaggtcgagaactatctggcctccggccagtggcgcggcaaggcgggcgcctacggcatccaggggctggccggcaccttcgtgcagaagatggtcggctcctacaccaacgtcgtcggcctgccgctgtacgagaccattttgcttctgaccggcgagggcttcgacgtccatagccggtggcccgaggcttgaagccggcgggccgaaaacccgaaggaatgaccatgcccgatgacaccagacagagcgccaagatcgaaccgctgcgcaaggcgcacccatgtcccgagtgcaacacgccgtcgcagcgcgagcattatccgttctgctcgaaccgctgccgcgaagtcgatctctcccgctggctgaacggctcctacgccattcccgttgccgaggacgaaacgaaggccgagtatcccgacgagaactgatcgcgttttccgctcgggaagccgttcattttgttcgataattcggaaaattcacaggcctgtcaaaaaactctcatttggcgcttgccatggccgaacaagatgttataaccccgctcgcttccggggaaaaccaaaccccttccgctcttgcaagtgagagtgtggccgaagcaggaatgcccagatagctcagttggtagagcagcggattgaaaatccgcgtgtccgtggttcaaatccgcgtctgggcaccactctttccctcagattgaaccgttgatcgagacgatgaaaagcccgcgtatttcgcgtcgcacggcactcgtgttcggccgggtgccgttgcattgcagttgagctacgagatcgtttttagccctggaacaggctgagaatgttgcgcggcgcggagttcgcgatcgaaagcgattgaacggccagctgctgctgtgtctgtagcgccgagagcctggaggattgctcctccatgtcggcgtccacgagacggccgatgccgctgtcgatcgaatcgctgagcttcgaggcgaagtcgttctgctggtcaacggtgcggctcaaggagccgatgtcggacgccaccttcgtcatctgctttgtcatgccttcgagcgtcgatagcatgtcgtcgagttccgccgatgtcgtcgaattgttgatcgccaggtcggtcgccgtcgcgggcgccgtggcgcccttcaggaccacgtagttcttggccgagcctgcctgcacggcgaaggcctcgctcgacaggatgccgtattcgccggagccgccgttgtcgacgaaatactgcacgtcggtgtcggtgcggggcggcggcgtgttgatcgcgtagctcaccgtgccgagctcgaccgtgccgtcattgtttcggatgaaggaggtgacgatctgtttgtcggcggaatcgacgctgctgttccaggaaagccagttctggccgttgaacgacgccgccgccagcgtcgccgtcagctgccccttcaactgcgtcagttcctcgttgactttcgtcttgtcgacgccgtcttcataagccgtgaccaacttcgccttcatctccgacatgacgtcgatcgaggaggcaatcgcctcgtaggtcgtgtcgagaatggcgccgctcagtcccagcgcgtcctgcaccgccgaaaccgccttgttgtccgagcgcattgtcgtggcgaccgaccaataggcggcattgtcggcggccttgccgacgcgcagtccgctcgacacctgcctctgggtctcgctcaggcttgagttgaccgaacgaagcgtctgcagcgcgatactggcggatgtattggtgacgatcgaagtcatgagtaactcgaaaattgaaacttcagatttatattgaaggatttcttgcgatctgcgcacgttatggatgttgaagtatagctatgctggttaataaactgcctatcgagacagatggattttagccaattcgtgccgaatatggtgatcgcaacctcgttgacagcatgtaaaaccatcaagaaacaccacatatgaatttgagaacgtgtcactggtctgtcagccatcgccggtagtccgcctctcacgtgcgatccatcttttgatttggcggcaaaggatcgggctgatacagcggtcttatcccgcaggacagcagagagtcgcatggccaagacgaaagaaccgaagctcgaacattccgaactcgccggcgagttcaccgacgatggcgtgaccgttctggtcgatatcttccgcccggcggggaccaatggcgactggaaaatggaagtcgtcacacaggacgacgacctgatcgaatgggaagagggattcgagaccgaccgcgacgctttcgatgaatttctggccaccgtcgagcgcgacggcatccgtacattccttgacgatgcggacgagccttcggttcattgatgccgtgacactgtcgtgaccgtcgcattcaggctggcaaatgtcgcttgtggaggccctttaaaacaaaccgaaactaaagtgggccactccgaaagataagtgcgcgcaaagcgcgccgggaacagcaaacatgaaagcgttggaatacagagccgctctggcggtcctgggattgaccactgctggagtggaaaatctctttggtgtcgatcagatcaccagccgccactgggcgacgggagagcaggatgtgccgcgtgccgtgtcgctctgcctgctcttgatggcgtcgcataacctgtcggtcgttcaggctcagatcctggccgacagcgtcgacgtgccgctggcgaaatccgcctgaacgcaggcgttcggcgaaagcgctcaggccgccggcgcctggatcatctttttcagaacatcgagaagctgcttggcgtcgtcgttggcgccgatcacccgcaggcgctcttccgcgaggctgatgatcgcttccatgctttcgcgttcgctccatccggacgcgacacaggcctgggccaggtcctcgaacgcgaactgcatcgcgtcctggcagcgcacctcccgatcgggatcgtcactggtgacaaatggcctgtagatctcccgcatcacagctctccgcaaatcattcgcacgagccatgctagaccacaggctttaacgaagtattcataacgatagcgggcaatctgggcggaaattcgcgtcgcgtccgttttcccatggagatggttgaagttgtctcgtcgcgcacactgtaacctaatgataagggcgtcgttctcaacgcctccatcaggtggtaatactactctcgccaaaaagaggggagatcaacatgccacgcatctcgcatctatatttcaagacggccattctgttcctgatcgtcggtattggaatggggctgaaaatggcgatctcgcaggactacagcgtgatcggcgctcatgcgcactgcaatcttctgggatgggtcacgatggcgctcttcggcgtgtattacgcgctcaacccgcgcaaggccgaacgccgcatcgcgacgatccagtacggcatctatacagcaggcgtaacgttgatggttccgagcctctacctgatgttgctcggcaacaccgctatggagcccgtcgtcgcggttgcctcgatcgttacgttcgtcggcgtcctgctgttcgccttcgtgattttctccagcgaacaggtggccatgacaccatcgacgccgtcctatcgctgaagtcttccgtttaaccttttcggcgcgcgttcttgggggcgggcgccgtggaggtcgctcaatggacgacctgaacgcgaatatgctccttggcggcgtaggaatggcagtcgatcggcgcatcgccgacgaagatcacatcgccgtcctgatcgaacaggccccagcaggcctcgtcatcgacatagaccttgcggacgtaaccgaacggcgcggtttcgaagacgacgtttggtgcaacagcaactgtctcaagttctcgcatggatcactccgatagtcatttctgttttagtgcgacatcatattgcattgcgaggctgatgcggggctatccctagaaatggggatggcaaactcagcttgacgatcatcgtcgcagggtgtcccgaatcggtcatgcatgctgatttccttccttggttgcagcgtgccgccccttgcggattgcgattgcagcggcgacaagagcgcattgcaccagccaatcgaagctcctatctactgataggaatcatctcaaaggaataactcatggccgacctaaaggttcgcactcgtcccgttggcgccagcgccgttctcggccgcaccggcttcccgcatgtcacctccgccacgggcggcgagatcgatatcgtcaccagcccatcgcagccgggcttcaacccgctggatctcctttattcgtcgctgtcggcgtgcctggtcttgagtgcccgcatggcggcgagccagctcggcgttctcgatcgcatcaccgagctcaaggccgacgtaaccggcgagaaggcgaccgagggtctgtcgcgggtgaagaccttcaacatcgtcttctccatcaagggcgacatcgacgaggagacccgccagaagatcgcccacgccgccgaggacgagatctgcacggtgagcaacacgatccgcggcaatccggaattctcgaccgttatttccggctgatccgacaccgaaaccggcatttgcgcggtctgggcacgccaatgccgatatcgaccgcgcctgtcgttcccgggctattctcggctcgacgcttctgctacttgcgatacatgatggcgccgctcgatcgcacgcgacgccgtaaacacggtacgccatgtcgcaagtctcctccgctctccctcggtccgctccctcgagccggttcgcgctcgctgctctgatcctcggcggtgccgcgatcggcggctcgccgatcttcgttcggctgtccgaagtggggcccatggccaccggcttctggcgcgtggcgctggcgttcttcccgatctacatcttctcgctgatcaagggtgggcctacgggtccaaagcccgagacatggtcggatcgcggcctgctcgtcctgcccggcgtcattctggccgccgacctgatcacctggcatctgtcgataacgatcacatccgttgccaacgcgacgctgcttgccaacctcgcgcctgttttcgtcaccattatcggcgtgctgttcatgggcgtggccgtcacgcgcgttttcgtggtggggctgctgctggcgatcgccggcgtcgttattctcaagggtggtccggcggcgctgggcgagggcgatccgctgggcgacggcggtgccattatcgccgcgatctgctacgcgctctacatcctcgccatcggcaagctgcgcgcgcgcttcgatacggtgcgtatcatgctgtggagcacggcgtccgcggctgtctgcctgctgccgttcggcttctttctggaaggccagctcttccccacgaccatttatggctgggcaatggtcttcggcctcgccttcatcagccacgccaccggccaggtggcgatcacctatgcgctggcctacctgcctgcggccttctcctcgctgaccctgctcctgcagccggtcgtggccgcgatcctcgcatggatactgctcagcgagccgatcggctcgatgcaggccgtcggtggcctcgtggtcctcgccgggatcatgatcgcccggcgaggttgattgtcatcaggcgacggctgcctgcttctgcatgcggcgtgcgtcgagaatggccagcgcctcgtcgacggtggccgccagctccgccttttccgtattgcaggtgttccaggcctcgatgaagctgctggtctttccgtagctgttgtcgagcacgcaatggtcggcgccgatcagcacgcacatgatatggccgtgcatgcggtcggtgatgacctgtcgcgccgaacccagaagcgccacgccgcggtcgaagcgctgctgcgcgcgctcgcggtaggcaagttccgtcatgcgggcgcgtccaccgatcttgcctgacagcagccccttcagaatggccgcgtgcttggtctgcttctggaaatcggcgggctcgtccggccagtccgatttcacggtgcccggacgctgcgtcgccgccgtcaggtcctgcggcgtgccgacctcctggtcctcgcgcaggttcaagagcagctcgtgctgcggcaccggctttgcgaccggcccgatgcagaaggccatgtcggggcaaagccgcgtctcgcactggaaccagcgttgcgcgaaggcaaggctcttcttgtcgcgcaccaggagcgtgaactggccgtgcttttcgatcgcccgcgcggtgctgtcgacgttggcctgatccttgaagtggatggtctgcggcagctgcacgatcggccgtcccttgtgccgctccagcatgttttcgcgaaactgccggtagcccgcccagatgtcgccgaaattgccgccgccatgcaggaagatccggccgtcgccgatggcgccaagcatgcggtcctcgtcgaaggtcgggatttcggtcacataggacggacgcgagcgcttcttgtcgaaataggcaagctcgccgagccagatggcgctgtcgccgatattgtagtggttcgggaagtccagcagtgcgtagcgctccgaggggtcgaagacatcagacaggttcttctcgatcacgccctgcaggcggttgatgatcgtcaggttggattccattgaaggctccttgttttagggacaagaggtccgaagtaagcgcggacctcaggcccgcgcgtgtttgcgaaacggattgagtgacattgcaagcgcgatgtacgggcggatgacggaacggccgaagatcggcaggaaggcgaggtagatcaccgcgccaaggccgatgctgaggccgagcgacagccagcggttctcgacatgcgcgacgatgacggggtgggcgaaccagacgcagacggccatcagcagcgagccgcacagcggcagcgccacggccttcagcgtgctcattgcatcgatattggcgaagcgcgccagcacgtactgctgatagggtagcgtcagccaggcgcgcagcgtatagcccgccgcaaccgcaaccacgccgtagggcaccagcagccaggtcagcaccagcgtcgcggcaagctgcagggcggcgaccgagaggatcgattccgcccggttgaccgccgacagcgccgacgaggcgaagaagttcatcacgaagggcacggccatcagcacaagaaccgtggcgatgtcgccggcattgccccacttgtcgccgaacagcatggcgatcatgtcgttggacagcgcgccgaagccgagcagcagcgggatggtgccgagtgcggcggcgccgacgatcttgttataggcgttgcggaaggcgatgtggtcgttctgcagccgcgacagcgtcaccagcgcgacactgccgatcggcgccagcacggcctgtccgatcagctcgatcaggcgccaggcaatacgatagcggccgacctcgaccgggccgtaccagcgcgagatgaagatatcctgcacgcgggcaagcagcatccacatcagctgcgtcacgacaaggctgatgctgaacaggaagaccgagcggaacaaaggcacgttgaaacggaacttcggcatccagggataggcgacccagccgagcagcacggtgacgacggcgttgacggcggtctgggcgaccagcgcccagacgccccagcccatgaaggcgcaggcgacggcggtgatgccggaaagcatgctggcggcgatcgcttgggccgcgaggttcttgtggccgaattcgcgggccagccgcgcattgtggatcacggcaagcgacgagaccggcagcagcggcgccagccagcggaggatttcggagactttcgggtcgcggaccagatcgccatagtaaggcgcgaagacgaagacgacggccgcgacgatggcgctgaaggcaatggttgcccagaaggcggtatccgcaagctcctcgtcgaggtcgagctggcgcgtcaccgcgtcgccgagcccggcataggcaagcaccctgcctatctcgacgaacaggctcgcgagcgcgaaggtgccgaaatcgccggggccgagaatgcgggccagaatgacgaagatcacgaatgtcgcaaccgtgctccacgcaacgcgaatgaccgaccagaggacggaaagcgcggtctttttcttcagctcggcgtggccaattgccgtatctgtcattcagtgtccaatcgattagatgcgcaggcgcaatgcttccggggtctgggacggctcaagcggcccggcccgtcttctggccgcgccagtaggcgaccatcccggtgaaattgtctctgagctggctgcgataggtcagccccagttcgtcgctgagcttgcggcggccgatcgcctccagcactgcctggcggatgtcccagcgcagcatgccgcgcatgttcgagcggcggtcgaagagatatttggcgtaaagcgccccgttgccgaaggcatatccgctctgcagcttcttcacgtcgccgagctcccggcgcccatggaaatgcttcaccgcgaaatccggaagatattcgacgcggatgccggaattgaaggcgcggtgcacataatcggtatcctcgcccgagcgaaagggagagccggcgccaaagcgggtgtcgaacaggccgaccttgtcggtcagggcgcggggaaacgccatgttggcgccatggatgaacccgccggcatgcagctcgcttgtcagaacggcgggctccagctcgggcttgatcgtgacgggcagatcgcgtgcgtcgccaagctcgatgcgtccgccgcgcatcacgatgtcggtgtcggcggcaaacagcgcggcaatcacggtaaaataatcgggaaacacttcgcagtcgtcatccgtgaaggcgatgatcctgcccttggccgcagccagcccgctattgcgcgcgacggaaaggcccggcttcgcttcatgcacgagattggtgctgatcggcgcggttcctgcccattcgctgacgatcgcggaggtgttgtcggtggaaccattgtcgacgaagacgagttccaggctgagatgatcggcctggcgtgcggcattcgaaacggcttccaggcagttcgtcagtccataagcccgatttctcgatgagatgatcaggctgatgtccacgggctgaggaggcattcgggttcccttctgcagtcgatgtcgagggaagggtagggcgctcccacagcctcggcaagaaacattttgcgttgcagcaaaccaatacagtttgccgaaaaaccaaaacaatgtggtgatttcttgccggtatattattaatcgcgggaggttgatattaaccggatattatttcgacaaacgggaacggtaattgtaataattcgtgtttgtttaatattatgtaagtcgtaattctgtttactttctttcattgatcgcgattgttctatttatatcgtgttgtaaaatagataaatatatgaaggagcgctgtggtttcttgcgtatgattttgtccgtcgtatcatgcttcttcgcatcggcgaaatggtttggaagcaaatgagaagtgttctcggcggaccaatatcgatcaagaaagccggcgaaattgaaagataaacgcaagaaaaggcccgccgcaggacttgagggaatacgacggccccgagtaaaatttcaataatgcgaccagcgggtgtgtccctgaaagcggtggatcaaccggtaatgaccgacccacccggcgcaggcaacgacacggttgcgcccgctggtgcgctattcgtcattggtcagccacttctggataacaggaatatcggcatctccaagcaagtgccctgtggggatgactgtcgaatcgacggttgcgccggaagccttcagccgtgtctcaaggtcgcttgcatatttgccataggcatccgtcttgccgctgataacgagcagatcggttcccttcaggtcagcgcgcggatattcgctcagaaccggcatggaacggagcagaaccgctttgtgaaccaggttggggtgcaggtagagaagcgagttcaacagattggcgccgttggaatagccgacatagacaagcttcttcggatcgagcccataggatttgaccgccccctcgataaaggcggcgaaagcctcggcctcgttcttgatatcctgctgatcgaaagaaaacggcgtgatgcgcttgtaccagcgaggaatgccttcctccgtcgcccgcccgcgcacgccgagcagcgtcgcgcgcggcgccaccttgttcaggagcggcatcagcgtcgtctcgttgcccccagaaccgtgcagcaggacgaaaacggtgccatcggggttcggcggcgtatagaagcggtgcacgaagggcagatcgcgatagttgaccctgggttcgccgggcatcgagaactgcggcagaaccactttcaggtccttcagatcggtgatcgggtccttgggaaggaacagcttttggccaagcgtcgccggcggctcgttcaccgtcatgccgggcttgtccgtcgccagctcgatcagcgtgccgcccggttcgcgcacatagagcgaacggaaatacttgcggtcgtgcacgttgacctcggaggagccttccttcttcagcgcgtcatgcgtcttcgacagcgccgcgtcatcgctggcgcggaaggcgacatggtcgaacgtgcccgtccccggcgcgccggaccagaagcccttggcgtttctgatatcgacgatgtcgccggactgcgagaccagccggtcgatgttgccccggttctcctggaagcggtagccgaaatggttttccacgaaggcgcggcttttctccggctcctcggtcagcatggtcgtcccgcgcacgcgctgcacggcatgttcggcgggaacatccgcgccgtgccacggcgtcggtgacgtcaccgtcgaggcgccggcgagcttgacgatgatgttgtcggggtccttcaggcgcagcaccggctcgccgaattcgtccgccggtccctcggcgcggatgccgtagctcatcgcccgcgtcagccagtaaccgatgctcgaagggttgatcgccaacgccagttcgctgagctggccgaagccggcgcggccgggcgcgccatcctcccacaccagaaacgtcacgagcgacccgggcgtccccacggcgtcaccgtagaagaggtgcagctgcgtcgcgtcttcgaaaccggccgtctgcttgaccagtcgcatgccgagaaaaccggcatagaaatcgacgttcgcctgcacctttctggtgagaagcgtgatgtggtggatgcctgaagtcattgacgagagcccggattgcattggggacaggaggagcgcggagatgaaggtgatgataacggtcatatcgttgcgtgtgtttggtgccttgtttgctctgcataaagaattagggcatctccgcaaggctgcaaatccaaagtccgcacatcccgcagcgcgagttccagctgctgccgcgttggcggcttgaccatgtaggcctgcgcgccaagcgccttggcacgctccatatcatcctcatcgcttgatgtgctgaggatgaaggccggtatcccgctcaaccttttatcgcgcgaaagcgcctccagaacctcgaatccgtccatgatcggcatgttgatatcgagcaggatgaggtcgatcaaaggatcgtgaccaccggccgatcgctcttcgagaagctgcatcgcctcgcggccgttcgaggcgacatgcaggttgaacgtcactttttcccgcttcatcagcttgatcttcagaagctgcacgtcggctggactgtcctcgaccagcaacacctcggccacgcggccgatcctatccgcacgctgctcttcttgccgtcggcttgccgcgccggcgggcgccttgtccgtctccggcaatgccagcggcagctccacgatgaaggtcgtgccgcccccctccgcgtcctcgcaccagatcgcgccgccatgcagctgggcgatccgccggcagatcgcaagcccgagccccgtgccctcgatgccgcggccaacgagccgcttgaaaggctggaagatcagctcgcgatgatcgcgcgcgatgccgggcccgttgtcgctgatggcgatccggcagagcgcatcttcgcgttgcgccgagatccgcacgcgcggctcctcggtctcgcaatatttgatggcgttggagatgatgttctgcagcatctgcaccagaagcgtcccgtcgcccatcacctcgggcagcgggccacgctcgatcgccgcgccgcggctgctgatctgttcgcgcagattgcgctccacctgatcgacgatcgccgacagcgataccggcttcacctccagatcgccggaagcctcgagcttcgagaagccagataccttgacgatcagctcctccatgtggtcggcggcgctgagcacgtagccgagcaggtcgtgatcgtcatgcgccagcgatggcgaggcctgcagcagcctgctgaacgacttgatcgtcctcagcggttccttcaggtcatgggccatggcgcgggtgaagatctcgagcgattgctgcttttgttcgagcctggcggcgagatcgccatgcatgatggcgctctggatgcagcggtgcagcgtctccggcgaaagcgtgtccttggtgaggtagtcccgcgcgccacccttcatcacctcgacggcgatcgtctcgcttccctggcccgtcagcatgatcacgttggcggagggatcgagcttcaatatctcctcgagcacgccaacgccgtcgcggcccggcagcgagtagtcgagcaacacgcaatccggccgcttctgtgcgttgagcgctatgccctcgtcgccgttttccgcttcgaaaaccacatagctcgcgcccggcacgcgcgccagcatccgccggtaaacctcgcggtcgtcgatattgtcgtcgataacaagtaccgcgctgccctcggccatactcacccctccagaggcaatatggcgatctcgaaccagtattccttcagcctctggatcgcggcgaacagaccgtcgagatcgacaggcttctggacgtaggtgttggcgccgagtgcgtagcagccctcgatatcgcgctcgtcgtcagatgtggtcaggatgaccaccgggattttacgccaggccgggttggacttgatcgcctccagcgtcttgcggccatcgagccccggcatgttgaggtcgagcaggatgaggcccgggcgcgtctccatcgtagccagcagatccagcgcctgctgacccgatggcgcccattgcaccgggttcttgagcttggcgcgcttgaaggcgcggatcgtcgcttcgtagtcgtcctcgctgtcctcgacgatcaggatcggctgtgattcacggtgctgcatgctgcccctcgcgcttgtgacccaatgtaaaatagaaggttgtgccctggccaacctctgactccagccagacgtcgccctcgtgacggccgatgatcttgcgcacgaaggtcagtcccgcgccggtgccgtcgtccgcctcctgcgtcttctccagccgtttgaagatgcggaagatatcctcgtgaaactcgcgcggaatgcccttgccgttgtcccgcacgaaatagacgtcactggccaggcgaccatcgtcgccgacaaacgcggcgacgtgaccgacggtcacgaccggctcggccttgtcgttgtacttcaccgcattggtgatcaggttgcggtagacctcggtcagccgcagcgaatcgcagacgacctcgggaagcgcgccctcgatgacaaccttcgcccgccgctcttccagatagagctccatggtcgcgaccacgtccttgaccacggcatgaacatcggtgcgcttgaccgccagctgctgccggccgatccgcgagaagtagagaaggtcgttgaccagcttctccatgcgctggctgagccggacgatgcggttgaggcgccgcacgccgtcctcatcgagtacggtctcgtaatcctccagcaggaagcgggaatgattgtgcatcccccgcaacggctccttgaggtcatgcgaggcgatgtaggcgaactcgtcgaggtcggaattgctgcgctccaggtcgtcggtataggcctggagctggcgaaacatcgtccgcagctgttcctcctgctgcacccgcaggctgatatccctgagaatggcgacgaaggtgaccgtcgccccggtcctgaaggcgctcagcgagacatcgagcgggaatgtctctccgttgcgcctgatgccggagatggtcccggttgtcccggtaccgccttcctcgctcaagagcagcgaccgccggaaatagtcgtcgagccccgcgtgataggtctccggcagcaacatgtgcacgctctggccgatcgcttccttcgatgtctggccgaacatctcttccgccgccgggttgaacagcgagatattgccctgcgggtccatggcgacgatcgcgttcggcgtgttgcgcgtcacggcatcgaaacggatgcgctcggcatcgaggctatcgctcttgcgctggaagaagaacacgaaggtcgccaccagccagagcatggcgacggttatggcgcggttcgtcgcctcatagccatagctcccgccatgtcgatcgacggcgagaaagccgagcaggatcaggatggagcagacgaatgccaggttgaacggcgcggtacggctgctgaaccacagcgaggtgaggatcagcggcacatagatcatgccgttgacgacgccgagcggggtgtagagatcgatcatcagcccgacgaagcagatcgcgccgggcagccagacgggcatgccgccataatggtccggctgcagccaccaggatcgcaccagcatcgccgagccgagcagtgtcacgccgacggcggtatgcaccgccatgccgatattcgacccccagcgatagatatgttcggtctgcatggcgtatccggcaagcgccgagatgccgaggccgatcaccacatagccgatcaattcctggaacagcctcgccttgcccttccggtccggtggtgtcagtgccagcgagaggttggagaagaacatgatcacggccgtattcagcgccatgccgccgccgacgcggccaaaaaatgccggatcgacgaagatgccggccaggaagcgctccatgatctgcggctggtgcccgacgaaggtcagttcgatcagccgtatgccgctcatcgccgcgccgagcgaaaacaggaggaaagcggcgagccgcgcgctggcgccgttgtaaacggagatgacgagcgcaatcccggcgagacagaagcagatcgccgtgttgatcgccatcgccggcgcgccgggtatcaggaagaggaccggctcgatctgccacacccaggcgaataggatcgtcacgccgagcaggagcatgagcaggccgagcacgatcgtggtcaagcggtgtcgttcctggcgccagggcgtactcgtccttcgaccaatgatcggtttcaccacgcgttgctctcccgtccgcggggttactatttccagaattgaaaattattcaatatacatccgccgcgatagttgccgcatcggcgtgcgcggcaatatgctggacccgtatgctttgccttgtcgtcgaacggcgcaccggggcgagagcaggaggtggcgatgccggcggtatattatgtggacgacagccgcgacgacctgttctacgcgcaatatgtctgtcgcagagcgcgcgacgacatcgacctttcctgctttgcgaccagcgacgccgcctttgacgcgctccatgcttccgtggcggagggtctggcgctgcccgcgctgctcatcgtcgatctatacatgcctctcgacagcggtattggcctgatcacccgtttgcgcgccgaccggcggttctcgtccatgcgaatcgccgtgtgttcggggtcggacgccacggcggatcgggagcgtgcattggcgtgcggcgcggatctatacgtcgagaaaccggtcgatctcactgtcctcatgcatatcggctcttcgtccgccgaagacagcggactttattaggtatttatgacgcaatggttgcaagtctgattgacacgactttggctacatttcacactatacgcatagaccagtgtgagacgatgccggggagggccgtttgactttgttggccataacaacctcggaaaacctgtgactgaattctgccgtctcgctgacgcgcgaaacgcgcagcgtatggcgtagaaaagggcgaataccgaggtgtcgggctaaaacgggggcgcatgccgattttgtgatcgacctcaagtgccggttccctcgaaagcccacactcggttgttaactgtaccagtctggcgcgtgtctccagaattcaggggatgctgctgagactggtcgcgaaggcaggctggaggcaagaatgcggaatgagtagcgcgatggcacttccatttcacgctggcccggaactggggcgggcgatcaaccgcacggatttctttcggcttctgaaggcggccgcgcatcactacgccttcgacagcttcgcgctcgcccgcatctccgaggcgtcgcagcccttcggcgcccgcgatatcatcatcaccaatgtcgccgaacgccagaccggcttctttgtctacgccatggcccgtgcgctcggcttcatcaagtccaaggccgcgcagttcctggcgacccccgtgagcggcagggccaacaatctggagggctatccgcccgatctggttctcaacgagttcgacaccaacagctttctgctcatcccgcttttcacgcccgagggccggcgctattgcgtcgccttcagtggcaagcgtcagcagccggaccagggcgaggtcgccgatatcctgctcgacacgatgcggatattcgacaagttctacgaggaaatactggtcaacgaaatgtccgggcgtttgacccaacgggagagtgaagtggttcgctggaccagtgaaggcaagacatcggcggagatcgccatcatcctcggcctgtcggagcacaccgtcaattcgcatatcgcggcgtcggtcaggaagctcggtgcggtcaatcgcgtgcatatggtcgcgatggcattgcgcatggggctcgtttcgtgagcgagaacgccggattgacgcaagacatggcgcgcggcgagaccgtcaggatccttttcatcgatgacgagttcatcgagttccgcgcccttaagaagacgttgtcagcggtcaccgagccgatggtcgagctggattacgcgcagtcggtccgcgatgcgctggcaaagatcggcagcgacaggttcgacctgattctgctcgacaaccggctgctgccgaacgcggattttcgccagacggtgccgaaactgcgtgccgccagctataccggcccgatcggcgtcatatcgatggatgtgtccgacagctacttccagcagttccaggactacggcgtcgactttcgcatcggcaaggacgagctcgacgtcgagacgctgcaatacatcatccgcgaatatgttcgctacgacatgccagacgtctggaaggacgattacaacatctgacgcgtcactgtaccggcaggcggatggtaaagcggcttcccgtctcggccgaggtctgcagcgagatcgagccgccgagcgcggtgacaagttcacgcgcggccgccagcccgaggcccggccgcctcgcggcaccctccggctgcaggctccagaaggcggtgaatatgttctcctgatgctcccgcgcgatgcccggcccattgtcggcgatatggatcgcccattgcgaggcatcggcctccgcctcgatcgtcagccgacaggcctcatccgcatcggcacggtgcatgagcccgttcgccatcacgttcttcagcaccagtcccaggatgcccgcatcggttcgcacgccgggcaggtcccccatctcgatcgtcgccttcggcgcatcgacctcgaagcgcagttccgcccagatctgcccgacgagcagcctggtatcgacatccctgatcgtaagcctgggcgtacccgatgcgaagccgatcagccccttcgtcagctcctgcgcggcctgcgtcttggcgagaatggtcctcagatattccaggtgttcgccatcgaccctgtcgccgatctcgtcgagaaggatctccgcgtacatcgcgatgtggcgcagcggcgattgcaggtcgtgcgaggcaatggcgaggaagcgcttgatgcgcgtttcgtcggtctctgtcgtcgatgatgacatatatcgcctcgcccgccctaaagcatgtcgcgcaaagtgtgcagcggctttgcggcaacgacatgcgacaaaaccggacttgaatcgtgacgcgaatccgggggatcgcaacgcgcttcagcccgggcggagaatagaaagcgggcgccggttctgcaaccggcgcccgcatcaatttcacggaagcaacctgaaaaggtcgatcgttggctcagcctgccgacttgcgcgagctcggcggaatgatgtcgaccttgtcgtcgttggtcgaaaccgcggcgcggtggcgcgtacgccagtcgccgaggaacagcaggatcggcgccgcgatgaacaccgacgatgccgccgcgacgacgatgccgaagaccatcgggatcgcgaagctcgacaccgcgctgccgccccagattgccatcggcagcagggcgaggaaggcggtgacgttggtgtagatgcttcgggccagcgtctcgttgatcgacttgtcgatcagctcgcgcagcggcatcgacttgtagaggcgcatgttttcacgcatgcggtcgtagacgacgaccttgtcgttcaccgagtagccgaccagcgtgaggatcgccgcgatggcggtcaggttgaagtcgagcccggtgagcgcgaagaagccgatgcacttcgtcacgtcgagaatgagcgtcacgatggcgccgaccgcgaacggccactcgaagcggtaccagatgtagagcagcatcgcgaggctggcgatcacgacggacaggatacccgcccatgcaagctcgccgctgaccttcggaccgatgacatcggttccaagcaccgttgccgaagggtcgatcttgacgatctcttccttgagcttggtgacggccgcggtctgcgcctcttcaccaccgtcctggcgctgggcacgcacggccatggtgttgttgtcaccataggactgcagcgaaacctcgccgaggccgaggctgttcaggctttcgcggaaccggccgagatcggtcgcgtcctgcgtcttcacggacatctggatgccgccgcggaagtcgacgccatagttgaggcccggagtgatgaacagcacgaccgatgcgagcgacagcagcgcggagacggtcacgccgaagaagcgcgccttcatgaactggatgtgcttgtcgtaagggtagaagaccggcagcagcggcttgatgttgatggtcttcagcttgaagcggcgggtgatctcgatcatcgagacgcgaacgaaggcgaccgacgtgaacatcgagatgatcaggccgagcgccatggtgaccgcgaagccgcgaaccgggccggagccgaaccagaacaggatggcggcggcgataagcgccgtcatgttgccgtcgatgatggtcgagtaggcgcggcggaagccggtgtcgatggccgcgaacgcgcccttgcccttgcgggtttcttcacggatgcgctcattgatcagaacgttcgcatcgaccgcgagaccgatgccgagcacgacgccggcgatgccgggcagcgtcagcgtggcgccgacgagcgtcagggccgagaaggtcaggatcgtgtggatgagcagagcgacgttggcgagaatgccccaggttccatagagcaggaagatgaaggccgcgacgaggatgaagccgacgataccggaatagatacccatctggatcgcatcggcgccgaggtcggcgccgacggtgcgctcctcgatgacggtgagcttggccgggagcgcgccggcgcgcagcatggcggcaagcgtgttggccgtctcggccgagaagttgccggaaatctggccggagccgccggtgatcggttcgcggatgacaggcgcgctcaacaccttgtcgtcaagaacgatggcgaagggattgccgacgttctggcgggtgatttcggcgaagcgggtcgcgccggcgctgtcgaagcggaagctgacgacgggctgctggctctggtcgaagctgacgcgggcgtcggagaggcgatcgccggagatttcgacacggtcgagaaccggataggtgttgccttcgtcatccttcagcatcgatacgccggggccgggagcattgttcggcgcaagcatatggaaggacatcttggcggtcgagccgagaagctggcgaaggcgggtcggatcctgcgcacccggcagctgcacgagaacgcggttgccgccgacacgctggatcgtcggttcggccacgccgacctggtcgacgcgctggcgaatgacttcaaggctctgctggacggcgctgtcgacgttgctggagataccggcttgcgagaaggcgacgatgatgttgccgccgctggtcgtgaccgcgagatcggactggccggcggaaaggccggtcgcgatcgtgttgccgagcgtcttgagctgggtgatggcgtcgttggtctgcgacgggtcgttcagcgccacgacgatctggttctggttgcgaacgacggatttcgtctggatgttcttctcgcgcagaacgcggcgcgcgtcctgcagcagcgattgcagacgctcgcgcgtcaagtcggcttcatcgacctcgagaacgaggtgcgagccgccgcgaagatcgaggccgagcgaaacctgctggcgcgggagccacgagggaaggctctgcaaggtggattgcggcagggcattcggcagggcgatcagaatgccgaggagaatgatcaccgtataggtggccaccagccatggtgaggtgcgcattgtgttgtctatccttgataacgcttgagcctgcgcttcgagcgcaggcgggcgtgtcgaaaatgcaatggagggcgccgggctaggcgcgtgtcgtcaggccgcgagccgaggcggaccgtgcgaatcgtaaggcttcgcgtcaggcgcgcgaaaggccgaggacgttgattgcgaaagcgggagtgaaacgagaaccgcgcgcttgatgggcggctgatccaccgtcgccgcatcgcccgacgcaaaggtcgcgtatctctgggcggccttgcgctccgcggccagcatgccgcgcacgatttcgtgggcgctgacctcttgcggttgaccatccctgctcgaggacgagacggcgttgggaccacgtgcgggaccaagcgcgagattgccgccgaacagcaggccgagataggcgaagaccgcgacgaccagcgagacggcaacgcgaccgctcatgcggcgcgtatcgaacctcatctggtcatcctgcggattttcaatctcgaaccggctcaacggcgcaaagttctctcattgtttctctggggaaggcgtttcctcagccgcgcttataccagcctcggtctcgacttcatagggtgcactgtcatgatgcacttgggatagccggtcaagcatgcccatggcgatttcgcgttcgcccatgatcaccgtgtccgcgccgtattgcttcagctcttcgacctcggcgtcggaatgcgcgcgcgccacgatcagcacgccgggattgaccgcacggccctgctcggccacgcggcatgcctcgaaagcgttgggaatggcgatgaccaggcttcgtgcgccctggagattggcgagatcgagcacttcgcgcgtcacggcgttgccgctgaccacctcgataccctgctcgcgaagcgcggtgatccggttgtctgaatcttcgatgacgacgaagggcgtgccggaggatttcaggttctgcccgacgatgctgccgacccggccatagccgacgaggatggcgtggcccgaaagcttggtcgcatgcacctcgtcctgaacgatcaggggctcttccgtcgcttcgctcgcggcttccgcggtcgttggctcggcgtgatgctcctcgcgcttcgcctccagcagcggccgaattttgtcgcagacgtagaagagcaacgggttgaggatgatcgagatgatggcgccggcgaggatcaggtcgcggccttcttccggcagcagtccgagcgccacgccgagtgccgcgagaatgaaggagaattcaccgatctggcccaggctggccgaaatcgtcaacgcggtgcccaccggcttgcggaacagcagcacgatgaggaaggcggccagcgacttgccgatgacgatgatgaagacggtggccagcagcgggatcggctgttcgaccaggatgttcggatcgaacagcatgccgaccgaaacgaagaacagaaccgcgaaggcgtcgcgcagcggcagactttcctgcgccgcccgatggctgagctcgctttcggccagaaccatgccggcgaagaaggcgccgagcgcgatcgagacgccgaacagcttggctgcgccgaaggcgacgccaagcgcgatcgccaggacgccgaggcggaacagttcgcgggaaccggtgtgggcgatgcggtgcatcgtccacggaatgagacgccgaccaaagaccagcatcacgccgacgaagagcgccaccttgaccagcgtcatgccgatgatgccgccgatgcccatgtccaggccgaatatacggttgatcgcagccgacaagggctcgacggtcccctgttcgctgccgatgctggccgccgccgggatgaggacgagcgcgagcaccatggcaaggtcttcaacgatcagccagccgaccgcgatcttgccgcgttccgtctcgatcagccgccgctcctgcaatgccttcaggagcacgacggtcgacgcgacggaaagagcgaggccgaagacgaggcttccgcccgttgaccatcccatcatcgcgcccagtccccagccgagcagggtggcgaaaccgatctgcacgatcgcgcccggtaccgcgatgccgcgcaccgacagaagatccttgagcgaaaagtgcaggccgacaccgaacatcaggaggatgacgccgatctcggcgagctcgggcgcgaggttctggtccgccacgtagccgggcgtgtatggcccaacgagaacgccggcaatgagatagccgaccagaggcggcatcttcagccggttagccagggcaccgaggatgaacgcgagcacaagacccccgacaatcgtggaaatcaaaggtgtcgcttctggcatccgtattctcccggctggaaattccgttttaattatgacatatatggcttatatcaaccaatatgggtggtttgacattatgggtcaaggcgcgaaagaaacaattctaactcccgctttatgccgcgctgccagggggttgctggactggacgcaggtcgacctcgccgatcatgccgccgtctcccgcagcacgattcgcgactacgagggaatgcaccacgaactgcatcgcgcgacggaggcgcaactgcgcttggcctttgaaaacgggggcgttgccttcatcgaggtcgaaggcaagggcacctgcatctgcctccagtccgcaaccgaatgagacgttattcgcgggccgccacgcagcttgccttggccttgtaggcgtagatcacttttccgcgataatagccgccgcttggctgccacgacttgatggtctgtggcgtttcggcgcaatcgaagggctgtgtggtcacgaacagcacgtcttcgctgacatcggcgggcaaggcgaaggtctgctcatagtagttgtcgggtgcccccgccggcggccgcgcgtaaatcttcagcggttcgtctctgagcgtgtaatacatgtccgccagcatgtcgcggttgtcgctgacgaggattccggtacccgcctgacgcgccagatcggcggcttcgcggctgaccgcgctgcggccgagatagcgcttcatcacttcggtgccgttcggcagcactagctggttcgcgaagatggcggcaagcggaaacagcaggctggcggtgccgttgatggcgaaagacacgcgcagtcccttgggccagacgcgatgcagcagccagacggccaggatcgtgccggcgacataggcggtcacggcccagttggcataggccttgccgatcagcgcctggagcgtgatcaggagcacgaccggaaccgaaagccagatgagcagtttctcgatcgcgctgccttgccccttcaggacacggtagaccgcccagagcatcgcgaagaacacgattggcccgacgacgccgaactgcgcggcgaagaactcgattccctgtccgaagttgaggctcatctcgccccagcgggcgatgctcgtggtgtgcttgatcgtcgtgccgtcatgggtgacgttccaccagacgttcggcgccgccacaacgatcgcggccgcgaccgaaatgaagaagtcgcgccagccgatccgcgccatcggcagaagcagcaatgcgatcaggccgccgggaacgacgaaaaggatcgcgtatttcgacaggaaagcgcagccgaaggccacgcccatcaggagcgccaggccgatcgaacgctgcttcgtcaggccgaaataggcaaacagagcgaccgccaggaagaacaggaggatgacgtcggtcgagaagaagacggaagacagggcgacgccgggcagggtgatataggtaaccccgatccagcccacgatatcgcggctgacgaagcgtttcgcgatcatcatcaggacaagcgcggtcgccatgtgaacgagcggaccggagaccctgatccagaagatcgcgctcgatcccgaaagctcggtcaccgcgcggatcacccaggcgatcatcggtggcttcgagaagaagccgaagtcgaagttctgcgaccagaaccagtattgagattcgtcgacgaacaggtcggtgttgtcgaagcccaatgtgacgacgcgccaaagcgtcacgccgataatgatgagaataccgaggcgtggggacattcgtctgacttccgtatgctaaaaaaatcgtcgccggccgatgcgtaaacgcttcgccggcttaatggttaaacacgttcattgctgtcgttttatgacgggaattcaaagcacccgcacaggcatggcgatgcggcccgcttcaatacggtcgagaagtgcgacggccgtgagaacagccacggcaagaaaacatgcacccaaacccagaacaatcattgctcaatccctatgacgtcatgtcgtgatttgcgggggatatagcacgaagcttgcttcgaacttgtagcagcggcgcaacgctacaccagtatttcatagatggttattcgcgttgctccgaaagccgacattcataaaatcggtattaaccttcaggcaaggaattaaccataaacattgcactacacgtcggaatgggaaaattttagcgttcctagcaggcatgacgccgaaccgccgtaccggctcaatccggtatcgatctctcaggtagctctacgatagtccgcactgctcggcacaggtccgaacgctggcgttagcccgcgtcaggcccggtcgcatgtgtgttggtgtctggaggcttgagttctcttcgggccgcgtgcccgggcattggttggggacaggcgttgcggcagaacatgccatcggatcaggatcgtggagcacaggcgggcagcctgcgtgaccgcctgcgctttgccggcctcgatgccgagcagtgcgagatggtgcggcgctaccgcccggcgctccagcagcacctgacttcgggccttcgcgatctcttccagcgtttccagtcgttccccgatgccgcccgcaatttcgagagcgagcgtcaggttgatcggctccatgatctgcagacgtcgcactgggatgtgctgaccgatgcgcgcttcgacagcctctacgccgagcgcgtcaaggtcctgtccgattccgaaagcaagatgggactggaccctcgctggcatgtcgccggccacggcgtcgtcctcgagcatatcgttgccggccttgccgatgagctcgccggctcttccttcctgcccagcgtcaagcgtcgcaaacgcgaaatcgccgatctcatgaccgcgctcatccgccttgtcatggtcgatgtcgagattgccgtgtcgctgcgcttcaacgcgttgcgtgccgcccagcagcgccagatcgccgatcagcgaaacagcgacagggccgaggttgcgcgcgtcttttcggatgtcatcgaaggtctcgccgcccgcgacctgacggcccgcgccgtcgtcaccgaggatggcccgcacaatgatgtcgccctggcgttgaacggcgcgcttgaagcgcttcaggccgaattcggcgcgatcagcgagcgtaccttgaaggccgaggcatcggtgcaggtgctcggccagtccgcccgcgacctttccggccacgcctcgggtcatgccgagcggctgctggcttccgccgcgacactcgccgatctgtccgaaaacgtgcgccgcagcgccgcgggcagccgtgcggccgaagatgccgcggcatcgacgcgcgcggcggccgaagcaagcggcgaggtcgtcggccgtgccatctccgccatggccgatatcgagcaatccgctgagcgcatcggccagatcatcggtgcaatcgacgaaatcgccttccagaccaacctcctggcgctcaacgccggcatcgaggccgcgcgcgccggtgattccggccgtggcttcgcggtcgtggcgcaggaagtgcgcgctctggcgcaacgctccgccgacgccgcccgcgagatcaagacgctggtcaccaccaccaagtcgcaggtggacgcaggcgtgcagatggtcggccgcacgcaggattcgatcggcagcatcgtgcgccaggtcaccgatatcaatgccgccatcgcctcggtcgccagccagaccagcgacaacgcttccgtgctcgacgcggtcaccaccgacgtcaagggccttggcgcgcgcgtcgccgaaagcgccggcgccgcatcgcattcggccgatggcgccgacgatctccacaccgtcatcgtcgagcttggccgcacggtccgcgagttccgcattgcccgcggtcgtgccgagcaggctgatatcaggcccgctcgcgccgtcgatgtgcagcccgcccggtgggctgtcgaggaaaacgacgcggctttcgatttcggccctccgctcgcaagtctcggaggtgggcgaaatgcatactgaagcaatgaagaatgacggcggctcacattcgctgggcgccaatcagcaaatagggaaagtctgatggcagcaaaaaagagtgggaagacgctgaatctggcggcgaccattgacctcaacgaagcctcggccctgcgcgacaagttcctgtcgatgcgtggcagcgctgtgtcgatcgacgcatccgcggtcgagcgcgtcggcgctctcggcgcgcaggtgctgatgtccgccgccaagacctgggaccaggacaaccttgcgttcaccttcaccaaggtttcggacgcgtttcaaaaaaccatgcagctgatcggtgtggacgttcacccgctgctcgccaaggagattaagtaatgaagaaaagagtgctgaccgtggatgattcacggacgatccggaacatgctgctcgtgaccctcaacaatgcgggcttcgagacgatccaggcggaagacggcgtcgaaggtctcgaggttctggaaagctccaatcccgacgtcatcgtcaccgacatcaacatgccgcgtctggacggcttcggcttcatcgaaggcgttcgccgcaacgacaagtaccgtgccattccgatcctggttctgacgaccgaaagcgatgccgagaagaagaatcgcgcacgccaggccggtgccaccggctggatcgtcaagcctttcgaccctgccaagctgatcgatgccattgagcgcgtaaccgcttaaactcaggaatttcttttatggatatgaacgaaatcaaagagatctttttccaggaatgcgaggaacagctcgcggaactggaatccggtcttctgaaaatgaatgatggcgatcgtgatccggaaaccgtcaacgcggtatttcgcgccgttcactcgatcaagggcggcgctggcgccttcggtctggacgatcttgtcgctttcgcccatgtgttcgagaccacacttgattgcgttcgttccaacaagctagagccgacccaggatgtcctgaaggtcatgctcaagtcggccgacgtgctcgcggacctgacgaatgccgcccgcgatggcggcagcgtcgacgagagccgcagccgtggcctcgtcaaggagctggaagcgcttgcgaacggcgaactcccatcgccgtcggccgcttccgaagcccctgcgcccgccgcccccgcgccggttgccgccgcacccgtcaagccgaccgacgaaagtggctttgcgccgatcccgttctcgttcgacgacttcagtgacgacgagaccttcgagatcaccttcaagccacgcttcgaactctactccaagggcaacgacgcgacattgctgttgcgcgacctcagccgccttggcgagatgagcatctattgcaatatggatgcgctgccggccctcgacgagctcgaccccgaagccgcctatttctactgggtcatcacgctcaagaccgacaagggcgaggatgcgatccgcacggtcttcgaattcgccgagtgggactgcgatctgaccattaccgcggtcgccgccgaaaccgaggccgctccggccgaggaattgccgatggtgcccgttcccttcgacctctcggcgctggatgacggccccgaggcgccggctcaggaaaaaagcgatgcctcggccgctgtcgccgccgcggaaacggcctcgaatgtgacgcagatcgcatccgccgccgcccgcgtcgagaagaaggaatcggctgccgccgccaatgctgccgccgccaatgctgccgctgccgctgccgcggcccagaacaatgccgccgccaacgccgcgggccagaccatccgcgtcgatctcgatcgcgttgatcgcctgatcaacctcgtcggcgaacttgtcatcaaccaggcgatgctctcccagagcgtcatcgaaaacgacacgaccggcacgtcctccatcaacatgggcctcgaggagttgcagcagctcacccgcgagatccaggattcggtcatggcgatccgcgcccagccggtgaagccggtcttccagcgcatgtcgcgtatcgtccgcgaagtcgccgacatggtcggcaagtcgatccgcctcgtgaccgaaggtgaaaacaccgaagtcgacaagacggttatcgacaagctcgccgaaccgctgacccacatgatccgcaatgccgtcgaccacggcatcgaaagcccggaaaagcgcaccgccgccggcaaggatcccgagggcacgatcaagctcaccgccaagcatcgttcgggccgcatcctgatcgagctgcaggacgatggcgctggtatcaaccgcgagcgcgtcaagcagaaggccatcgacaatgacctgatctcgccggacgccaacctgacggacgaggaaatcgacaacctgatcttcgcgccgggcttctccacggccgacaagatctccgacatttccggtcgcggcgtcggcatggacgtcgtcaagcgctcgatccaggcgctcggcggccgcatcaacatcacctcgaagcccggccagggctccgtcttcaccatgagcctgccgctgacgctcgccgtccttgacggcatggtggtcacggtcgccggccagacgctcgtcgttccgctgaccgcgatcgtcgaaacgctgcagccggaggcttcggccatccattccttcggcgccaatcatcgcctgatctcgatccgcaactccttctgcccgctggtcgatgtcggtcgcatcctgaacttccgcgccacccaggccaatccggtcgaaggtgtcgccctgctcgtcgaatccgaaggcggcggtcagcgcgcgctgatggtcgatgcgatccagggtcagcgtcaggtcgtcatcaagagcctcgaggcgaactacacccacgttcccggcatcgccgcggcaaccatcctgggcgacggtcgcgtagccctcattctcgatgtcgacgcagtcgtgggcgcctcgcgcggccaggcgctgagacaggaagtatccttggcggcggcgggttaaaccatgtcctacaccgtgaaaagtctgaacgaaggggaccgcgagctgatcgcgttccgcgtcggcgatcaggagttttgcgtcaatgtcatgtcggttcgcgagatccgcggttggacgccagcaatggccatgccgcactcgccttcctacatgaaaggggtcatcaacctgcgtggcgcggtgctgccgatcatcgatctctctgcccgtctcggcatgaagccgaccgagccgacgcagcgccatgtgattattgtggcgcaagttcaccgaaaagtggtcggtctgctcgtagatgcggtgtcggatatactgactgttagtgaagacaacgtacagccaactccagagatcgcgtccgaactgcagcgtcagttcgcgcgcgggatcatggcgatcgaaaaacgtctgatctgcctgttggaacttgaagccatattccctgacgcggaaagcgaagctgcatgagtgtcttgagtgccaaagatgtaagaccggggagccccgatgaggttctggcgagcggcgaatacccgttgacgcgccgcgacctcacggagatcgccgcgatgatctactcggatgcgggcatcttcctcaacgagaccaaggcatcgctggtctattcgcgtctttccaagcacattcgcaatctcggcctgtcaggcttccgggaatactgttcgttggtatcttcgccggcgggcgcggcgccgcgtcgcgaaatgctgtcgcatctgaccaccaatttcacgcgcttcttccgcgagaaccaccatttcgagcatctgcgcgaccacgttctgccggagctcctgcagcgtgccaagtcgggcggtcgcgtgcgcatctggtcggctgcctcgtccgacggccaggagccctattcgatcgcgctgaccgtgctgtcgatgatgccgaatatcgccgactacgatttcaagatcctggcgaccgacatcgatccgaagatcctcgccattgcccgtgccggggcctacgacgaaaacgcgctcgaaaccgtgtcgcccgcgatgcgcaagcagtggttcagcgaagtcaatgtcgatggccggcgcaagttccaggtcgatgatcgcgtcaagcggctcatcacctataacgagctgaacctgatggcccagtggccgttcaagggcaagttcgacgtcatcttctgccgcaacgtcgtgatctatttcgacgagccgacgcagatgaagatctggtcgcgcttcgccgagctcctgcccgagggcggccatctctatatcggccattccgaacgcgtatccggcgattccaagcatgtcttcgacaatatcggcatcaccacgtaccggtatacgaccaagggccttgggaggaggggatgagcatggcggcacgcgttctcgttgttgacgattctccgaccatgcgcggtctcatcaccgccgtgctgcaatccgatcctgaggtcgacgtcatcggccaggcgggtgatgccatggaagcgcgcgaggcgatcaagaagctcaatcccgatgtcgtgacgctcgatatcgagatgccgaacatgaacgggctcgatttcctcgaaaagatcatgcgtcttcgcccgatgcctgtgatcatggtgtcgacgctgacccatcgcggcaccaacgcgaccctggcggcgctggagatcggcgcgttcgattgcgtcagcaagccgcagccgggtgatgttcgtccgttcgccgacctcgccgaaaaggtgaaggccgccgcccgctcgcagcgccgcccggtcatggcgccgcagcccgtcgcgccgccgccggcggttgccgattatcgtgtcggtcgcaaggttgtcgcgatcggttcgtcgaccggcggcgtggaagcgctgattgccgtgctgcagaaattcccggccaactgcccgccaaccgtcatcacgcagcacatgccgtcgaccttcaccaagagcttcgcggagcgactgaaccgcctctgcgcgccggtcgtgcaggaagcgacggatggcgcgcgcctcgaaatcggcaagatctacctggcgcccggcggtgaacggcacctgcaggtggtcaatgcatcggcgccctgctgccgccttctggaacgcgagcccgtcaatgggcatcggccctcggtcgacgttctctttgattccgtcgccgagcttgcgggtcgcaatgctgtcggcgtgatcctgaccggcatggggcgcgacggcgccgccggtctcctgaaaatgcgccatgcaggcgcacgtacccttggacagaacgaaaagacctcggtggtctacgggatgccgagggtagccttcgaactcggcgctgtcgaacaacagttgccactcaatgctattggcgaagaaattttaaagatgaccgcccgaaaggaaggaactgactaatgtcactcgcggaaaaaatcaaagttctgatcgtcgacgatcaggtcaccagccgcctgctgctcagcgatgcgttgacccagctcggcttcaagcagatcacgtcggcaggcgacggtgaacagggcatgaagatcatggcccagcagccgcaccacctcgtcatctccgacttcaacatgccgaagatggatggcctgggcctgctgcaggcggtgcgcagcaatccgacgaccaagaaggcggcctttatcatcctgaccgcgcagggcgaccgcgcgctggtgaccaaggcggccgcgctcggagcgaacaacgttctggccaagcccttcaccatcgaaaagatgaaggcggcgatcgaagccgtatttggagcgctgaaatgacgaccgaggttgcggcccgccgtgttcatatcattcagggcgaatggaaggtcctgaatgatccgaacgcggttctgacgaccatacttggctcgtgcgtggctgcatgcctacgggatcccgtggccggcgtgggggggatgaaccacttccttctgccgggcaatgccacgacgcccatgacggggggagacgcgacgcgctatggcgtgcatctcatggaactgctgatcaacggtctcctgaagcagggcgcgcgtcgcgaccgcctggaagccaagatcttcggaggagcgaagacgatctcgacattctcgaatgtcggggagcagaatgccgcttttgccacgcagtttctgaaggatgagggcatccccatcgtcggttccagcaccggcggcgatcacggacgcaagctcgagttctggccggtctccggccgcgctcggcagtatccgctcaccggtgccgaaacacagaagaccgtcgcgctcgagcagcgtccggttgctccgcagaagccagttgaaaccagtatcgaattcttctgagccgaggtcccaatgaacgtgaatgcacaggccgatcacccgtcgccggtcgaagcgctgcccgatatcctgatgcgggttgtgtccgaactgcacgatgtcgcctatctgattgagcgcatcgaaccccagcttctggagatcggtggagaaaatctgctgaacgcaccggaaagcatgaaggtcttgcaggggatcgaccttgccgtgcagaaggcgcgcggtatcgccgaattcatcgacacgataacgggcgagatctccaatgactggatggtcgacgtcgctaccgcgctcagccttgtgaagctcagcgaaatgcagcgtgcgctgggtggtggcggcatgcgccacggccattccaagccgctcaacaaggctgccggcgacttcgatttcttctagccggccctcttacttacacgtcaatacgaaacgctcgcacaagtttcggcttctataggtcaaattaggcgataggcctgctttgtctgtaaagatcgtgcgagaacagaatgaatctgttaaatcaattacttcaggttgttaggaactttagttcccttgggcggaatcgcctgctggcattggccggcgtcggggttgtttccgtggcgctcattctcggcgccgctctactcgtcaacaagcctgctcaagaaacgctctatgtcgggctcgaatcgtccgatctgaaccagatcagcatcgcgctcgccgaggctaacattgcatttcaggttggtgcagacggcgcgagcatcaccgtgccggccggcatgaccggcaagtcgcgcctgctgctcgccgaaaagggtctgccgaacagcaacaacgccggctacgaactcttcgacaaggtcggctcgctcggcctcacttccttcatgcaggaagtcacccgcgtccgcgcgctggagggtgagattggccgcacgatccaatccatctcgggcgtatcggcggcacgcgtccacatcgtcatgccggaggtcggcaacttccgccgggccgagcagaagccgacggcatccgtcatgcttcgagcgagtgcctcgaccggccgcgccgcggcaacctccatccgtcacctcgtcgcctcggccgtgccggggcttgatgtcgctgacgtgaccgttctcgattccgccggacagctgctcgcctcgggcgacgacgccaccaacggcaacttcaatcgctcgctcggcatcgtccagaacgttcagtccgagatggaagcgaacatcgacaaggcgctttccccgttcctgggcatggacaacttccgctccagcgttaccgccgatctcaatacggatgcccagcagatccaggaaaccgtctacgatccggaatccaaggtcgaacgctccgtccgctcgacgaaggaagcgtcgcagtcgcagcagaaatcaaacgacaacgccacgaccgttcagcagaacgttccgcaggccgctcccccgaccggtggctcaaacggcccggactcgcaggataagtccgacaagagggacgagcagaccaactacgagatcaacagcaagaccacggcgaccacgcgcaacagctacaaggtcgaaaagctctcgattgccgttgtggtcaacaagggtcgcatcgccaagatggtcggcgaacccgcagaccaggccaagatcgacgcctatctcgctgaaatgcagaagatcgtcgcctcggcggccggcgccaacaccgcccgcggagacgtcgtcacggtcacggcgatggacttcctcgaaaaccagcttctggaggaaaccggttcgggcatccgcatcatggacatgctgagccgcaatctggccggcatcatcaactcgcttgcctttgtggtcgtcgccttccttgtcatctggatgggtgtccgtccgatggtccgcagcatgaccggcggcggtacggcgatcgccggcgacacctcgctcgaaagcgccggcctcgagcttccggatttcgccccggcgggcgatgccggcggcggagccctcatggacggcttcggctccgacttcggcttcgacagcacggaagatctcctcagcctcggcgacgacgacggcagcttcaaccgccgcgtcaaggaagggccggagcgcaagctcgcccgcatggtcgagatcaacgaggaacgcgcagcgaaaatcctcaggaaatgggcggtcgacaacgccgcgtaagacaagggccgggaaaccggccctttttcttttgcacacatcgcacgcacgaaatcagtgcatgactcgcgtttgacgcgaatcgtattgcaataggccctcgaatcatcttagcttactataacttctaagagatgatttccttgtgcgaatcagcgcacagtttgcggacaaagtaaatccccagaactcggagatggtgatttgcatctgtttgcgtacccttggatgattcgcggagaaggtgcatttctttgctgacagacgtgatcaagcttttttcgtgataggttctcagcctcaggaattgccaatggacatgcatattttgcaagctctcaagagcgagacgaggacaggaaacttcgtcgggattgccacggccaacctgtcgtcgcgctcggaactcatcgcccagctttgtgagatagcgggcacgggaaggttgcagcctggtttgcgcatcctgaccgactatgtgggggcttcgcactatctcctggcgcgcgccgatctgctgcaggaagcaggcctcgatttcgtggtttcgtccgactggcccttcgatctcgtcaccaatctcgccgaggcgttcgtgggcggtttcggtcgtgccaccgagcttgagaagtgcatgcagctgttccagccgcacttcgccgtcctgcctgaaacggccgatgttcccgatggcgccagccgtcaatattgctcgctgatgttcaatatcgggcgttcgcgccttgcgctgatgttcctgttcgacgacggcttcattctctcgcaggagcgcctgagggatgtcggtctgctcaccgcctattacacgagcctgctgcaatatagcggcacgaagacggatcgcgatttcgaactgaccgatcgcgaactcgaatgtctcttctggatcgccgaaggcaagaccagcgacgaaatcgcgatgatcctcggcatatcgcgcaacaccatcaacaactacatcaccagcgtcatgcgcaaaacagcgacgaagacgcgttccgaagccatcgctttcgcggtcagaaacaatctggtgtaaggggacgcgctcatgggatacgcatcgggccgctcgatcagcaacgcagacactgccgggcgctcggcgcgcgccagcagggtcagcagccgatctgatctatttcctcgcctggtcgccatgcagaagctggccgacgcgcagaacttcgctgtctatcgcatgtcgggctccggcctgccggccaagcagcgcctgatctgcgagctggagaactggggttctgccaatgccgcgctgcacaagagctttgtcgatgcctatggcgacgcgctgatcgagcacgtggagaaatcgctgttgccgctggcctgggccggcagccacgatcgcagcttccccggcgccatcggcatggcgccattcgtggtgcggctgcccgatggtctcgtgccgttctccgggcttgcttttcccgtccgcctcggcgcgatcggcaacggcttcgtcgtctttacgggcgatgacctcgatccgccgaacgacatggtcgtcgaattgcacggtcgcgcctgccaggtgatgatcgacctgctgtcgctcgacgagcggcgggtcgccgccgccgaagcgctcagcgaacgcgagatcgcctgcctgcagctcgccggtgacggccgtatcagtgaggaaatcgccgacaagctgggcctgtcggtgcacaccgtcaacgcctatctcggttcggcgacgatcaagctcgattcggtcaatcgcatccaggcgatcgccaaggcgatccggctcggctacatcagctgacctgtgcttcttgttggataatcagctcgcgagcgcctgaagcggcggcacgttgtagcgcgcctggttgaggctgtgctcgagaaacgccgtattttcgtgcgggttcgacgaagggttctcgaaggcgatgtggttgatctcgatacccgcatgctcgtcggcaagcgtcagctgcgcgtagatggtcacgccgcgcggcttgatttccaggtcgatgacgacctccggcttgccgccccactcgagcgtatagctgccgccatggccgaagttgacggtagccggatgaaagaacatctcggcggcggaggaaacgaggtccgaaagattgccgtaatactcaaatcgcaggatcgaaatcaggtccgaagcatccagcagccgcaattcggtcgcgacggggctgagcgcttcggcgagaatcttctcgcgctgggcagagtaggggcatttcttcattcgtttatcttacccggttgttctgggcctgcgccgcgtacacccgatgaatgagctccgcgacggccttgtagaatactgacgggatgacactatccaccgagacttgcgcaaacatggagcgcgcaagcggcggatcttcgaaaaccggtattccgttcgtctcggcgatctctctgattttcaaagcaattaggtcctggcccttggcgacgacgataggcgcgtcgttttcctcgcgcacatagcgcaaggcaacggcaaagtgggtcgggttggcgatcaccatggtcgcgcgcggcacgttggcgatcatgcggcgtcttgcccggtcgcgcatcagcgcgcgttgccggcccttcacgaaggggtcgccctgcgattgcttgttttcttccttgatttcctgcggcgacatcttcagttcggtgaaccagtgatagcgggtccagaagaagtcgacgaccgccacgagcgcggtcgcgatgagcaccaccagcgtgatcttccgcatgctcgacatcatgcgggagaaaatcgtctgcggatcggaaaacatcgcgtcgatcgccccgaagtaatcgctccgcaagagcagcaccaccacgataccgacgatcacgatcttggtcagcgatttggcgaactcgatgaggccctgcatgctgaacagccgcgaccatccctgagccggcgagatgcgcgaccactgcggccttatgcgctcgagcaccggcacgggcagggtctgtccgatcgaagcgacgacgccgaaggtcatgatgaggatcatcgcgggcgcgagcagctgcgcactgacccagccgagatggacgaagagcgacaatacgtcggtcccggtgttgagcttccactgatccggctgctcgaaaatatccttgagggatgcgccggcggtgatcaggccgtccggcaggaagaagatcaggtagatgtaggtggcgagaaccgtcgcgaagaggggcagttcgcgcgagaacggtgtattgcctttttctgccgcgtcgctttgctttttcgcggtagggtcttctgttttactgtccttgtcgtcgtccgccacggtcgcgactcctactcaaaagaaaaaggccgcgccagcgcgcgacctttgcttttgtagtccccgcggctgccgtgatcaatcgcggcgttcgtctcgggtctatctgtacacagcaacagcggcttaggccgcggccgcgccctcggcttcgccttccttgagctggatctggccggaattggccaggcgaatcgcttcctgggcgatggcgcggcgggcgatcgcgatttcgcgcgggttgatacccgtcgtgccgctctgcaggtcggattcgatcatgcggcgctgacgcggactgatcgaggccagaacggattccttcatctccgacgacgcgccacgcagcgccatggtcaggatgtccgcggaaatgtcgttcagcagcatcacgcggctgcgctgcggcatgaccagcatgtcttcgaacaggaagatcttcggacggaccttgttgaccgattcgcggctgatcgattcgagcgatgtcagcaaggtatcgacctgcggcttttccatctcgttcatcagttcggcaaccttcgtcgagccgatcgaattcttctcggcgtcgatctcggcgagcagcgtcatcacctgcttctcgatgatctgcgcggccttcgggctgacggatttcaggttgacggtacggttcatgatgtcggcgcgccggccgtccgggatctgcatcagcaccttggcgccgaaggaggagggcatcatggacaggatgtaggcaaccgtctgcgggtgttcgcgcagcaggaacttgccgatgaaggcgggatcgccttcgcccagccggtcccagatcgaggtttcataggcctggaacgccgtgcgacggccaagcaggctgtcgacttcgtcgggcgtcaacccttcttcaaggatgctttcgatcgccttggcgttgtccatgagaccggcgccttcggtgaacagatcctcgaactcggccacgaggccgagcagttcgtccggcgggatcgcgcgcaaggcctgcgcagatccgatgatcgtctgcagttcggcctgcgtgaaatacttcaacagtctgccagcgacccctttccccatcgcgaggagaacggccgctgctttctcagcctgggtcaacggtttctcggcaagagcgccgccgaaatcgtcaaagtccatcatggtctaacctctccgtccctacagcgggatcaggctttcttagtacctaaaacttctatcagtttcacgccaaagcgcgtgtcgtcattttcaagaacggtgatctcgccgcgcgcgatcttgcggccgttcaccatgatttcgaccggctcgccgatcttcttgtcgagggcgatcgtcgcgccctcgttgagattcatcaggccggatacctgcatacggctgctgccgagcatgatctggacatcgatcgggatgtccatgatcagatccatgttcgactgcatcgcgctgccgagcggggccgcgacaccggggctcgccgaggtgtcgccaaaatcggaaacgccgccgaagtccgacgtgccgccgaaatcaccgccgccgaaatccgtgtccgtaccggcatcgagatcgccgccgaatgccgacagatcggtaccgccgccaaacgcgtcgagatcatcgccgccgaaatcgggcatgccgccttccgcgtcggttttcaaaacgccacgcagatcatcgatagcctgatcaagctcggcttcgttgcctggttgctcgagatcggtgctctttgtttttttcgtcgccatgaaatcactattccagttgaaacttgcctcaacctgccttgggggtcaggggccgaaatgcgttaattcattaagtagcggatgaggtcgtcatccgagttgatcgtatccttcaccctgacggtataattctcgcccgagcgtccaaactcacacacgtaaagctctttgctgttggcactgacatcgacgcggacatcaccgctgtcgaggaaaggaatgacgtcgccggccgcgagcttggagatggtgcgcagcgtcagctcctgaaggcggatctttgcttctagcgttacctgcgaacggcgaacctgttcgctgatctgttccgtccactccgacgagttggctgatgcattcttcgcgcgcggggcaacgacggtcgtcttcagcagcgccgcctggggagcgatgagcgagaactccgatgtaatccccgagagcgtgatcgacatgttgatcgcggccgcgaattcgtccggcttgtcgtccggcgccttgggccgggtctcggctgcgtgaggcgcctcgagcatgggctcgaaaccacccggcgcgttgacggcggaacgcaatacgttggcgatcttctcgaagaccgtgacggcaagttccagttcgatgatcgagagctggcgatcggcaggctgttcgacggtctcgggcgacgcgccaagcaggtgttccatcagcgtgatgatgaagccgttgccgcaggaaagcgtgatatcctgcgaccagttgcgaagcgatccgtcgacgagggtgatgctgtcgccgagatcggcgaccaggtcatgcttgtagcccgcctgacagccgagataattgacctgcacgtcgaggtttgtctcgctcttgatgacgtcaggaagaaagacgcggtagacgtcgccgaacgccgcgcagagtttctccaccgttgccttgtcgcccagcctgcccgtcagcttcgcgagcagtgcatcgtccatgaggggtttttgaagttgcgcgttcatgtccgtcaggccgccttgttctcaccaccggggttcatcatgtcttgctcgaccgcgtcgattgaaggacgtgcgtaagccgagatcgtcttgcggccgtattcgccatgaagctgccgatgatacagccgcagataatgacaaacccgataatgatattcatcgtcagtccagcctgaacttccttttcaaccgaagggataggatcgctggcttgcgtgaggctgatcctggccttgcgcatcaagcttctttccaggctttccggatgccagcttcgcgcaaggatttggtgacagtctgttgctgacgagtgggccaccatgcccatgtctgagatgccgcctcagcggaatcggggtccaacacaccacaacacccgggtttcgtaacgttcatcgccaatgccaggagcctatcccgatgcaatccggtctctatgtttcgctgtcgtcgcagatggcacttatgcgtcgcctcgacacgatcgcggacaacctggcgaacgtgaacacgacgggatttcgtggcaccgaggtcaagttcaatcagctgatcggcgagacagagaacaagatcaacgcgaagatcgcatacgtttcccagggcaacgactacctgtcggccgagagtggcgaaatgaaccagaccggcaacatgcttgatttcgcgatcaggggcgatgcgtggttctcgctcaatactcctgccggcaaggttctgaccaaggacggccgcttcacgctgaccgacaccggggagctggtgtccgtgcgcggatattcggtgctcgacgccggcggcgcgcccatcatactcgacaagaccgccggagagccgaaggtcggcgccgacggcatgatctaccagaacgaccggcaggtcggttcgctggggctattcgaagcggatatctcgaagggttacctgcgctacgaaaacagcggcatcatgcccacgcaggcaccggtagcggtcaccgaccgcttcaacgtcggcgtccggcagggctatctcgaaaactccaacgtcaacgccatgcgcgaaatcacccagctgatcgaggtcaatcgtgcgttcgaaagcatgacctcgctcaccaaggacagtgaatcctccttcggcgaagccatcaggacccttggcggcagccgctaagcggaaggtttgatccatgggtaacgaattgctgaccgaggcggctctctctccgaagctcacccatctcgaggcgcttgccgcacgctatgccaagcccgatttcatgatcgcgccgggcggccatgtgcagacgatcgcgaccggccactacacggtcaccggtctttcgcgccatctccgcctgggcgagttcgtcgcgcacaggtcgccgaccggtgtgcatctcggcgaagtcgtgcgcgtcgagccggatcttgcctatgtatgccctatcgagcccggcgaaccgatcgggattcacgataccgtcatccgcaagggcgccttccgcatcgcgccgtcggacagctggtgcgggcgaaccatcagttcgctctgcgagccgatcgatggcaacggcccgatcgtcgaggggctgaagcgtcggtcgatctccaacaccgcgccaccgtcgatgacccgtcagcgtgtcgaaaagggcttcaagaccggtgtccgcgccatcgacatcttctctccgctttgtctcggccagcgcctcggcatcttcgcgggctccggcgtcggcaaatccacgctgctgtcgatgctcgcgcgcgctgcggccttcgacaaggtcgtgatcgcgcttgtcggcgaacgtggtcgcgaggtgcgcgaattcatcgaggacacgctcggcgccgacatgcagaaatccgtcgtcgtcgttgcgaccagcgatgaaagcccgatgttgcgcaagatggcgccgctgaccgcgatcaccatcgccgagcatttccgcgaccagggcgacaacgtgctcctgatcgtcgatagcgtgacgcgctttgcccatgccatccgcgaagtcgcgaccgcctcgggcgagccgccgatcgcgcgcggctatccggcatccgtgttcaccgagttgccgcgccttctcgaacgcgccggccccggccccgagggaaccggcaccatcacggcgatcatctcgatcctggtcgacggcgacaatcacaacgatccgatcgccgactccacccgcggcattctcgacggccacctcgttctccagcgcagtctcgccgacgagggacgctatccccccatcgatccgctcgcgtcgatctcgcgtctggcgcgcaaggcgtggacgccggaccaggagaagcttgtctcgcgcctcaaggcgctggttcaccgctacgaggagacccgcgaccttcgcctgatcggtggttatcggcagggcgccgatcccgatctggacatggcggtcaagcaggtgccgatcatttacgacgtactgaagcaatcgccgggcgatccgccatcccccgattcctttgccgatctggcgggagccttgaaggcggcggccggtatcggcaatcagccgaacgtacgcagatagccgagctagaagatggaaagaaaccacgtgaccgatttcgacgacgacgaaaagattcccccgctggcgccgcagggcggtcgcagatcgaccttcaacgatcgcgcgctgacgatcatcggcctgctgctcgccggcgcatcggcgatctttccgtggtacgtgttcttcaacgaaagcaagttcggcatcgatgtcgccgcgggcgaccgcacgcgcgatctgccggactggcccgcgcgcaacgttttcagcgtttcgccgctggcgatggccaataagaaccctccggaaaccaagcccgacattcccgtcgacccgttgacgacggcgacggtttcgtcgatcggcaaggaggacgaccggggcgctccgcttgaagatcagcctttgcccggaaagtcccctttccgcctcctgtatgtcgccaacggcagagcgttgatcgaggccacttccggcatgtacgttgttcgcatcggttccatcctgccggatgaaagtcgtcttgccgcattggaacagcgcgacggaaagtgggtcatcgtaacctccaagggcgaggtctactgacgcgtcggctgcgcccaagcccagtttttcaaggctcctccgcgctgcggtggagcctttttcgtcccgcgcgatccaagcctgctcttatggagcaagaacgcattctccgtaagtctgacgcaagattacccgcctaggttcggctcagtaagaaggagagttccatgcaaccgattcaactgttcgacttggcctcgcggcaggcggaatggctgaccattcgtcaggaagtcgttgccggcaacatcgcgaacgcgaacacgccaaagtatcgcgcccaggacattaccccttttcaggccgttctcgaccgttcggacatcacgatggcgcgcaccaatgccgcgcatctgagcggcaacaatctgaacaccaagaacgacatcaacgtcagggatgccgagttgaatcaggaaatgggtgtgcaggaatcgggcaatacggtcggtctggccaaggagctctccaagtccggcgaaatcaagcgccagtacgagctgaacacctcgctggtggggtctttcaatcgaatgatgcttatgacggtgaagagctaatatcatggatcctttgtcagccgcttccaaaatcgcatcttcgggcctcgaggcgcaatcgacgcgtcttcgcatcgtctccgaaaacatcgccaactcccgctcgacgggtgatacgcccggctccgatccttatcgtcgcaagaccatcaccttcggcgaggccatggatcgcgccaacggcttggcgacggtcggcgtcaagaagctcggcgtcgacgaatcgaagttcagcaccgaatacgatccgaacaacccggcggccgacgccaggggcgtggtgaagttgcccaacgtcaacatgctggtcgagatggccgacatgcgcgaggccaaccgctcctatgacgccaacctgcaggttatcaagcaaacgcgcgatctcgtttcgtcgacgatcgaccttctgaagagccaataatgattaacgccataaacagcctcagctccctgtcgatcacgcgcgatctcagcggcgtcgatctcggcaaatcccaggcctcgtcgtcggcgcagagcgccaccaacgacgccagcttcgcatccgtccttggcaatgcggccaccaacgccgtcaattccatcaagggcgcggaaaacatgtcgttccagggcatcaacggtacagcgacgacgcgcgaagtcgtcgatgccgtgatgcaggcgcaacagacccttcagaccgccattgccattcgagataaggtcgtttccgccttcctcgaagtgaccaagatgcagatgtagttgattttgaggattgagccatgagagcgcttgccatcgcagcaacgggcatggatgcccagcagaccaaccttgaagttatcgcgaacaacatcgcgaacatcaacaccacaggcttcaagcgcgcccgcgcggaattcacggacctgctctaccagaccgagcgcgcgcagggcgtttccaaccgcgccaaccaggcaatcgtgccagagggcgccaacatcggtctcggtgtgcagacctccgctgtccgcaacctgcacatccagggcgaactctctcagaccggcaacgatctcgacgtggcgctgatcggtcgcggcttcttccagatccaggctccagacggcacgacgctctacacccgcgccggtgcgttcaacaagaacgagaccggccagatcgtgaccatcgacggttacaccgttgcgccgaacatcaccattcccgtcggttcgaaggagctcaccatcagccgctccggcgaagtgactgcggtgttgccggggacgacggcgcccaccacgctcggccagctgcagatcgcggatttcgtcaacgaagcgggtctcaagccgctcggcgacaacctcttccaggaaacgccggcttccggccagccggtcgtcggtacgcccgacgatccgggctacggctacctcaagcagagctacctggaatcgtccaacgtcgatccggtgaaggaaatcaccgagctgatctcggcgcagcgcgcttacgaaatgaactcgaaagtcatcaccaccgccgacgaaatggcctccatcgtcagcaagaacctgaagtaacagggaagggccgaaacatgacgttttgccgggtagaacatcttcgtggatgggcgaaagccgcggtcatcgcggccatcacccttgcggcgccgtcggcctatgccgccgccgacttggggtacgcagtcattccgaccaccatcatctatcccggcgaaacgatatccagcgcgcaattgcaggaagtcgaggtcacaaaccccaacctgcagggagactacgccaagaccatcgggcaggtggacggcatgatttccaagcgcacgttgcttcccggccagtcgatttccatctccgctttgcgcgagccctacaccgtgacgcgcggctcctccatccgcctgatcttcaccgtcgggccgatggcgatctccgccgccggctcgccgctcgaagacggcatgaccggccagctggtccgcgtccgcaacatggactccggagtgatcgtcagcggcaccgtgctcgcgaacggcaccatacacgtggctgcaaaatgaagatcctgtctcgtcttttcatagcacttgcgctgctcgcgccgaacgtcctggccgtcacgccggcctcggcgctgaactcgcgcatcaaggacattgcctcgctgcaggcgggtcgcgacaaccagctcatcggctacggcctcatcgtcggtctccaggggaccggcgatggtttccgttcatcgccgttcaccgagcagtcgatgcgcgccatgctgcagaacctcgggatttccacccagggcgggcagtcgaatgccaagaacaccgccgccgtcatggtcaccgccaacctgccgcctttcgcaagccccggcagccgcctcgacgtcaacgtcagctcgctgggcgacgccacgtcgctgcgcggcggaacgctgatcatgacgtcattatcaggcgccgatggccagatctacgccgtcgcccagggctcggtggtcgtctccggctttaccgcgcagggtcaggcctcgaccgttaccgaaggcgtcacgacggcgggccgcgtgccgagcggcgccatcatcgagcgtgaactgccgtcgcgtttcaaggactcggtcaatctcgtcctgcagctgcgcaacccggatttctcgaccgccgtgcgcatcgccgacgtggtcaatggttatgcgcgcgtacgcttcggcggccccgtcgcggaggcgaaggatgcgcaggaagtcatcgtccagaagccccgcgaagccgacctcacgcgtctgatggccgacatcgaaaatctcgcagtcgcaaccgacacgccggccaaggtcgtcatcaacgagcgcacgggaacgatcgtcatcggtgcggacgttcgcgtctcgccggtcgccgtcagctacggcacgctcaccgtgcaggtcaccgagacgcctcaggtcatccagccggagcccttctcgcgtggcgtcaccgcggttcagccgcaaacggatatcatcgcccagcagactggcggcaatgtcgcgctgctcgacgggcctgacctgaagaccctggtggccggcctcaacaacatcggcgtcaagccggatggcatcatcgccattctgcagggcatcaagtcggccggtgcgctgcaagcggagcttgtcctgcaatgacggctatctctctcgcgaacatgacggtgtcggaactgacgcggcggttgatcctgccggcggcggccgtcgtcatgctgaccatccccggcgccttcgcccaggaagcccgcacctctgcgggcggcgagctgacctccgaggaggaaatcaagcagttctgcagcaacattgccgaccccgcgcgcgaccagcgctacctgctgcagaagcaggagctcgacaagctcagggccgatgtcgacagccgcatcgccgagatgacgaagcggcgcgacgagtatcaggactggctgaagcgccgcgacgactttctgaagcaggcggaagcaggcctgacggatatctataagaaaatgaagccggatgccgccgcgcagcagcttcaggaagtgaaggtcgaagtggcggccgccgtgatcatgcggttgaacgccacgcagtcgagcctgatcctgaacgagatggagccgcaaaaggccgcggtcatcgccaacatcatcgccagcgcgtccgaccccaatacctcgaaggatccctcatgaagaagcgtttcccgctcgcgatcgccgccgtggccgttctggccgccggctgccagtctccgcaggcgatcaaggagatcggccgcgcgccggccatgagtccgatcggcagcggtctcgcctatggccagacgcagcagatgtcgatgtatccgaagcagccgcgccaggtcgcgcagggctattcgctctggagcgactctcaggcgacgctgttcaaggacgcgcgcgcgctcaacgtcggcgacatcctgacggtcaacatctcgatcaacgacaagggctcgttcgaaaacaatacgaaccgcagccgtaccaatagcagcggcctgaactgggacgcgcaggccaacattctcggctggaacccgtcgtcgaaaaccgacgtcagctacggttccgatacgagcacggacggcaagggcaagatcgagcgcaccgacaagctgaacctgatggtcgcggcggtcgtgaccggcatcctcgagaacggcaacctggtcgtcagcggctcgcaggaagtgcggctgaaccaggaactgcgtatcctcaacgtcgccggtatcgtgcgtccgcaggacgtcaccgccgaaaacgagatttcctacgacaggatcgccgaagcgcgcatctcctacggcggccgcggtcgcctgatggaagtgcagcagcccccgcgcggccagcaggccgtagacatcctttcaccgctctaaggtccggtaaaatggcagacgcagaaggcaccgagggccagtcgaagaagaagtcggcgacgatgatgacgatcatcggcgtcgccgtcctgaccctccttggcggtggcggtggctgggtcgtcggcggcatgatcgcacccggcgtgaagtccgcgaagcaggccgagcaggcaaccgcggcggcggctaagccggccgaggcgggattgcagaaaatctcgaccgaagccaacaacgtcgttcagctggaaccgatcacgtcgaacctggcctacccctcggaaaactgggttcgcctcgaagtggcgctgctgttttccgagaagcccgacgttaagctcgccgaggagatcaaccaggacatcctggcctacatccggacagtttcgctgcagcagatcgagggccctcgcggctttgaatatcttagggatgacatccaggagcgtgttgaccttcgggcgcagggacgcgtatcgaaagtcatgttcaggaccttcgtcatcgaatgattcgattcctagtgatcttggctgccatgatggcggtcccggagctggcgcatgcgcagcagctcccgtcgaacctgctcaacctgccggtggacggctcggtcgcggcatggatcattcgcaccttcggtctcctcaccgttctctcggtggcgcccggcatcctgatgatggtgacgagcttcccgcgcttcgtcatcgctttctcgattctccggacaggcctcggcctcgcttccgccccctcgaacatgatcttgctgtcgctgtcgctgttcatgacgttctacgtcatgcaaccgaccttcgatcaggcgtggcgcgatggtgtccagccgctgctggccaaccagatcgacgagcagcaggcggtcgagcgcgttgccgagccgttccgcgccttcatgacgcgcaacacccgcgaaaaggatttgaagctcttcgtcgatctcgcccgtgagcgcggccagacggtcgatgcgggcgagaagatcgactatcgcgtcctcgttcctgccttcatgatctcggagatccggcgcggctttgaaatcggcttccttgtcgtccttcccttcctcgtcatcgacctgatcgtcgcgaccatcaccatggccatgggcatgatgatgctgccgccgacattgatctccctgccgttcaagattctgttcttcgtcctgatcgacggctggaacctgctggtcggcagtctggttcgatccttcaactgacgcgcgacacgcggacagaagcaccatcagtcaagaacgaagaagccggcgatcgatccgccggcttcttcgtttgtttctggggtcgcgacctgtcgcggcccgggtcagaacggcatggttctggcgggcagggcgggcacgtcgaggtgatccggctccagccccttcttggcgcgcgcgacagtcatctcgtaagccgtctcgaggtggtggcagaagcgttccgcgtcgaacagtggcttgatcatcttgttctcttcgatcgtctgcttgaagtcggcgatccgcgcggggttctcgtagagagcgaccgccatgtcctcgtaggcctgtgcgtcgttggccaccagttcgggaagcccgatcgcgttcagcaggctctcggtcacgcgtgaggcgaaattggtgcccttcagcgtcagaaccggcaggccgccccacagctgctccgacgtcgtggtgtggccgttatagggccaggtatcgagcgcgagatcggccgcctgctgcctgtcgatatggctgtgataatccgcgtgcccgcagaagacgagacgcttggcggggatcccccggcttttgaagtagtcgcggagattggcttccgtctgcttggacaccgccatcatccacagcacgctgttcggcgcccggcgaagcacgttgcaccagacatcgaccgtttcgggcgtgatcttgcggctggcgttgaacgaggcaaatacgaacttgtcgtcgggcagtccgaattcgccacgttccacgaagccgggcgtcggccggtggaaaggatcgttcggctggtaactgtccggcaggcggatgaacttttcgtggtaatgcggcttcgaggtgtcggggagcacgaacttgtcgccgatgacgtagtcgacatcggtgttcgtcgcgctgcccggaaagccgagccaggaaatctggatcggcgccgggcccttgttgagaacgtgatagcgcgtttcgtatgtcggtcccttgagatcgaccagaatatcgatctggtcggcccgcatgcgttcggccatcgcctcgtcgctgaggtcgcccacctcgacgacccggccccagaggctccggtcgaaagtattgtgttccaggtttgaagcgcgcgagtggcagtagagcgtgatctcgaagcgctcccggtcgtgcaactccaggacgcggcccatcagcttcatggtcgcatgctgctcgaagaggtcgttggaaaggtagccgacgcggatcttgtccgcccacgggtgggccctcgtcctgcgcgcgatcgtctgctccgccgtcaccgccttgttcatgctcgacgtcatgcgattgagcgcttcatccccgcaccattgcagattgtagaactcgctctcgtgatgcaggaacgaggtctcgccgctcgcaatcaactcgtcgatgatctgcttgtgaagcttgatgccggtcagatcgcatacgtgcctggcgaacatcagatacaggaagcgcagcggcaccaacttggggtagcgcttgaacaggttgcggatcagcaaggcctgggtttcgtcgttgggatcgttcttgagcagcctgattgcaagcaaggtgtgatcggtgttgctgctttccgcgaggaccttgacgaaaggactgagcagctcgtcctgaccgcgctttttgtagatcgaggccagcgcgaaggcgagttcggcgtccaggctctggttgagcatatagcgcaggccgagccggatcgtctcgtcatggttgccgacttcgaagtacagaagcgccgccttgcgggaaaactccgccccgctctggcccgccttttcgccggccaccgcaaaggccatcgccgcatccgccttcattcccagctgcgacagcgtgcgggccagcaaggcgtaggtcttcgcgtcctgctgtgtctcgagcaacgcattcagcgtctcgagcgacttggtatagcgcccgctctggtagtcttttgatgctgcggcaaacgaaaccacacgattcacgatcaaacctcgttcagttctttacgcggcgcacagggttccgcgggccggttcggcgcggacccaatgaggccattgtgacgcagaatggcacgcgaaccttgcctcaggcaggaagagacgatcgccgtgaccgagccggcagatggcgttaaactttttgtgatccgatttaactagtagttaaccatttggattcgtttgagaaatggcgaggcgacattaattagtccgcaaggttttgctgcgaaagtcatcctcgacatgacgggtttggtcccaatgcagaatgaccaagtggcatgaagccgaaccgtcattgccggtacataagtccggtaatgtcctccattggtatcgaatttcggggacgtatccatgacaagcatcaacaccaacaattccgcaatggcagcgcttcagacgctgcgtagcgtgaacaacaacctttccgacacgcaggctgctgtgtcgtctggtctgcgcgttggcaaggctgccgacaatgccgcttactggtcgatcgcaaccaccatgaagtccgacaacagcgcactttcggctgtttccgacgcactcggcatgggcgccgccaaggtcgacacggcttacaccgccgttcagagctcgatcgacgtcgtatcggaaatcaaggccaagctcgttgctgcgaccgaagacggcgttgacaagggcaagatcaacgacgaaatcaagcagctgcagcagcagctgacgagcattgcgtcgtcggcttccttcaacggcgaaaactgggtttccaccacgggcgcggcaggcaagaccatgtcggttgtttcctccttcatccgcaccgctggcggcgtcagcgtctcgacggctggttacacctcgaccgccgacgactacctgttcgccaacgacacgggcatcctggaccgcgacggcacgggcaacatcactgcctcgctctcgaccttctcgatcagctcgacgaactccaaggctgacatcgacggcctgatctccgacgctgaaaccgcgctgaagagcatgacctcgctcggctccaagctcggctcgctgcagaagggcatcgaccttcagagcgacttcgtctccaagctcagcgactcgatcaactccggtgttggccgtctcgtcgacgccaacatggaagaagagtccagcaagctttcggctctgcagacgcagcagcagctggccatccagtcgctgtcgatcgcgaactcctcttcgcagaacatcctgtcgctcttccgctaagagcgcgaagcgaaaatcagaaatcggtgcggccgggcattgcccggccgcattttttcgtgcctgcgcgccgcccgccgtaagtgcccggtatttcttaaatttcctctcgccggctttagtctttcttaaccatgttgcagtcatatgggttcatcgaaacggtgagttgatcagcacacgcagggtcaacaggcatgacgctgaccgccgtttccggtaagaatccggaatgtcccttcgtatgaaaaattgccgaaaaggggctttttaaatgaccagcattctgacgaacaattccgcaatggcagcgctgcagacgctgcgcagcgtgaacaacaacctctcggacacccagagcgctgtgtcctccggtctgcgcgttggcaaggctgccgacaacgctgcttactggtcgatcgccacgaccatgaagtccgacaacggcgctctctcggccgtttccgacgcattgggcatgggcgccgccaaggttgacacggcttacaccgccgttcagagctcgatcgacgtcgtgtccgaaatcaaggccaagctcgtcgccgccaccgaagacggcgttgacaaggccaagatcaacgacgaaatcaagcagctgcagcagcagctgaagagcatctcggcttcggcttcgttcaacggcgaaaactgggtttccaacgccgaaaacaagacgatgtcggtcgtttcgtccttcatccgcaccgccggtggcgtcagcgtcagcacttcgggctactccgcccaggccgacgatcttctcttcagcgacgcgacgtcgggcattctggaccgcaccggtacggcctccaacgcatcgatcgccgaattctcgatcgccacgaccgacaccaagggcacgatcgatcagctgatcaccgacactgaaaccgcgctgaagagcatgacctcgctcggctccaagcttggctcgctgcagaagggtatcgacctgcagacggacttcgtctccaagctcagcgactcgatcaactccggcgttggccgtctcgtcgacgccaacatggaagaggaatccagcaagctttcggctctgcagacccagcagcagctcgctgttcagtcgctgtcgatcgcgaactcctcctcgcagaacatcctctcgctgttccgctaagatcgccggcgccgtcaggcgccagcacgggaataccccgccgcttcggcggatggttttcgaaggccgcgctccccgagcgcggcttttttgttggcgttaactttttgttaaccaaactcatgtcttgtggcgatcattaaacggtatgttaaccaagcttaagaagcggttagcaggcatgaggctgatgaaccgttcccgcggtagatcgggatgtcccttttttagaatttgccaacaaggggcgctcttttcatgacaagcattttgaccaacgtcgcggcgatggccgcgcttcagacactgcgcggcatcaacaccaatctcgagacgacgcagggcaacgtgtcctcgggctatcgcgtcgccgaagccaaggacaatgccgcctactggtcgatcgcgaccacgatgcgctcggacaacaaggccctttcggccgtctccgacgcgctcggcctgggtgccgccaaggtcgataccgcatacgccgccatggacaacgccatcaacatcgtcagcgagatcaaggccaaggtggtcgcggccaccgaaaacggcgtcgacaagacgaagatccagaacgaaatccagcagcttcagcagcagctcctcagcgtcgcgcagtcggcgtccttctcaggcgagaactgggttgccggcaacggcacgaagagcgtcgtctcctccttcgttcgcggcgcgaacggcgaggtttcggtccagaccaccgactacaatctcgacgacaatcccgacggcaacgttctcttcggcatgcaggtcgacggcgaactcgacaccacaaccggcatcattggcaccgaatacggcacctacggctccatctacaacatggatatctcgcagctgagcgtcacggacctgaacaccacgctcagcaacgtcgaagccgggttgagcgcgctgaccaaggcagcatcgcaacttggttcgatctcgacccgcatcgatctccaggacaccttcgtgtccaacctcagcgactcgatcgattcgggcgtgggccgtctggtcgatgcgaacatggaagaggaatcgagcaagctgaccgcgctgcagacccagcagcagctggccatccagtcgctgtcgatcgccaactcgagcgcccagaacgtgctcacgctgttccagaactaagcggtccgccggcgtggaaaacgcctcgaaatacattgccaaagcattgaaagccgtctcgaaagacgcggctttctctttgtttttgaaaagagaatcaaggttgcgcgaggcttgccggaccgtttgtcggctacttgcgctggctgtatcccttggttaccttctcttaagaattgatttgttgagcgacgagccgatcgggaaaatccggttggcggcatgaagccaagcctgtcgctgccggcgatccggtctatcctttcctctaccatagagctccaaaaatgacctatcgaatcaccagctccgcacaggtaaacgctctcgccgcattgcggatcatcaacaatgaagcagcgacgacccagcagcaggtatcatcgggcaagcgcgtggaaacggcggcggacgacgcgacctactggtccttcgccagcgttctgcgctccgacggcagctccatggccaacatcaacgacgcgctcggcgtcggcgcctcgaaggtcgataccgcctacacggcgatggatggcctcatcgatcagttgagcagcatccgtgcaacgcttgtcagcgccaaggaagtcggcgtcgacaaggaaaagctcaacaccacgctggatcagctcaagcagcagatgcagacgacggttcaggcgacgagcatcgccggcgagaactggctgttcaaccaggatcccacgctgaccacgtcacgttcggtcatcggcggcttcacccgggcgcccacgggcgaatatcagccgcagaacatcagcttcccggccgaccagacggtcatgatcgataccaacaaagccgatcgcggcctgctgaccaagaccgtcgatgccagcaccttgaacctgaccggttccaccgcgccgcgcaattactacctgatcaatgcgggatcgatcaccggcgccgaaggagacgagatcaagctcgacagcaacaccacgtccgagcaggtcgatgatatgatggccgtggtcgacaaccttctgtcgacgctgaccacgaccgccgccggtctcggcatcatgagcgcgcgcatcaacgaccgcatcgactacaccgcagacatggcggacgtgatcaagaagaatgtcggcgcgcttgtcgatacggacatggacgaggcgtccgtgcgccagaaggcactggagacgcagcagaagatgggcgtgcaggcggtctccatcctcaataccgccgccagcaaggtccttctcctgttgcagtgatcgtaagatcgccgtcggtggcggccattcatcttcgcacaagtttggcctcctacggtcggaaacaacaggcgtggtgaaaaaccgcgccagggatttgtttggtgcaatgtgaggcgcggcatgtcgcaggcttctgctgataagaggtgggttgagtgagcgcgctgctgtctcgtctgaaagacttcggcgaacccgccgtcatcgcacctgccgtagctgaaacttcgttttccgacgacttcggcggcttcgacgacattgtctccgagcctgtcgtcgatatcgaggccgagcgccgcgacgccaatgctatcggcgaagcgaaggcgaccgccgagcttaccgagaagttcgaggccgaggcgcagacggtcgcgcttgttcaccaacgcgagatcgaagagcttcgcaacagatacgagaccgagatcgccgagcttatcgcctcaaggatagacgtgatctccaggacggtcgcggatctcgtaagcgctacggtcgcgcgaacgctggctcccgtcttgaccgaggcgttggccgaaaaggcggccgtcgagttggcggcgcagctgcgcgatgccgttctggagggagagaccggcacgatcacggtcaagggtccggaaacgcttttcaatatcttgaagaacgaactcggcgaaaaggcagcagttctgcgccatcacgagagcgacgatatcgatttgatcgccgagtttgatgactcggtactcgtaacccgcatgtctgcctgggcggcgagcgtcaagaaagttctggaatgagcgacagcgaaaatcaccaccacggcaagaacgagatcatcatcgtcaagcgacatggtggtggcgatcacgacggcgcccatggtggcgcctggaaaatcgcctatgccgacttcatgaccgcgttgatggcgttctttctcgtcatgtggctggtcaatgccgccaacgaggagaccaaggcctccgtcgccacctatttcaacccgatcaagctttcggacgaaaagcccacggaaaaaggcttgaagaagccggtcgagcaggctgacggggaggagaaggccgacaagtcgaaggaaaagcaggaccagccgaaccagggcgctgcggcggccagcggcgaggaccagacctcgacatcgggcgaccagcagaactattccgaagcggatttcttcgagaatccgtattcggttctggccgaaatcgcccaggaggttggccagcaggccaatgtcagcgccaagggcgagggcggtgcggccgattccggcccggcaaccggcgccgatggcggcgaggcttaccgcgatcctttcgatcccgacttctggacgaagcagatcgaggtgacgcgcgcggacaagacccagcccgacgatccggccaagcaggcgatcgaactcgccaaggcggaagacgccaaggcgcagcaggtcgacatccagcccgtcgtcgcgcagacccccgaggcgaccgccaaggccagcgacaagaccagtgaccagaccgccgacaagaccgccgacaaggatggcgtagcgccgctgacgcagacgccggcggaaaaggcagtcgagcaggaacagcaagccaaggaactccagcaggagatcgccaagcagatcggcggtgtcgcgggcaagctcgcggaagggctgacggtgacgccggcggagggtggcctgctggtcagcatctccgaccagagcgacgattccatgttcaacgtcggttccgccgtgccgcgcaaggagatggtccttgcgatgcagaagatcggcgaggtgctcaaggcgaagaatggcgtcgtggcgatccgtggccacaccgacggtcgtcagtacaagggcgagaacgcgaactggcgcctttcgatggatcgcgcccaggccgcctattacatgatggtgcgcggcggcctcgacgagaagcgcgtctcccaggtttcaggcttcgccgatcgcaggctcaaggacaccgccgatccgtacaacgcctccaaccggcgtatcgaaattctcctccaggccgatgaggggtaaccgatgaagcgccggcagcacaggcatctcctgcctctcgcattcagcatcgcgctggcggcgaccggtgtcgcgcgcgcggaagacgcagcgtcgcccgcggcggcgccgccggccggaactgccgagacacaggcgggcggtgccgaggcacccgaatccaagcaggcacaaccaccggccgccacaacggccgccgccgaggcgttgcctgtcgcgccggcggacgacggtggcgacacggcaccctacaagatgctgcgctcgctgcagttcattcaggattccgtcgtgctcggcgacagttccgccaacgagatgcagcgcttcatgctcggcacgatcgacaagcgcctgcgcgctgtcgatcccaccgtcttcgatgacgaccgcaacgtcgacgccgccctgatctacgccatgagcggcggcaatccgcagacgctggaatatctggtggcgcgcgacgtcaacggctatttcgacaaccgcgtgaccgacatcctgcgcaaatatctgagcggcaagggtctgctcgtcgccaagaccttggtggagatgtcgcaggagtacaaggacaagaagatcggtccctacctcgcgctggttggcggcaacgtcacgcttgccaagagcccggaagaggccctcaagctctacgacctcgcgcggttgaacgcgcccggcacgatcatcgaggaggcggcgctacgccgctccgtggcgatctccgtcgacaaggggctcgtcgatcaagggttgaagtattcgcagcgctatgtccgccgcttcctttactcgccctatgccagccagttcgccgatctcttcgtgaagctgctggtcgatcaggaccgcaacgtcaagcccgacgacgtcgtcggcatcctctccttcatggacgaggcgcgccagcgggaaatctatctgcgcatcgcgcgggccgcggcgattgccggaaagggcgaactcgcccgcatggctgccggccgagcgcagtccctgtcgggcaatgcgaacaatgcgttcggcgcgcttgccgacttctacggtggcatggcgtcgatcccgacggacaagatcgataccgcggcgcgcaatatttcgaacatcgccgacaaggcgctttcgccgcgtgaccagatcttgcgggctgccgcgcggtcggtcgcggagcaggtgcttcggcaaccagacgctgcaagcctgacgcaaggctctgctaatacaccaaatggtcaagaagctagctctgaacaggccgccgggggaggatcggccgcagagggggcggttcccgacgccgtgccggcgattgggtcgcaatcagcggatccacagaacgccgaccccgcattcagctcatttgtgacctcgagccgctctcagttggatgagatcgacggccttttgaacaaggaaagcaattgatatgatggatatcagcgttccggccggagccgcggatgccgccgcgggagcaaaagccggccggccggccggcaagggtgcggacaccgaaggcagcggcggcttcgccgacgttctgaacaaggccaatgccggttccgaccgcaaccagggcaccaaggccgacggcaagcaatcttcggaaacggccgataacggcaacggagccgtgacctcggcgccgccgcgctcgaaaccgaaaaccatcatcgatcttggcaacacagccgtactggcgcaggcggaagcggatgcgacgacggccaatgccggcaaggacacccagaaggccggccggatcgatatcaaagcgcttggcaagcagatcgacgacgcggcagccgacgaaaccgtggccgacgtcgccgacaagattgcagtaccgacatcgaaggacgaaaagaccggcaagccggtcaagaccgagacgaagcccgcatccacggacgacaatgccgtctcggatgtcttgagcatgctcgaaaagacgccggtggatggcgcgtccgtcgccgccgcgggattgttcgcacagaagacgacggaagccgtggccgccgatgccaaggacaagtcttcgggcaaggcgaagtccaaggatgacgcggtcgccgatgtggctggcaccctgaagtcggctacggataccacgtccgacgtggacatgcccggtgcgacctcctccagcgatacggtcggtcagaccttccggctgacgcgcgcggatagccgcggaacgtccatggacatgtatattggcgccgaaaaggatgccggcgaagtcggcggcaaggcaaatatcgagaccgtcacggttgtcgattcccggcgatatcttggcctagcgcagaatacgaactccgccgccgtgacggcggcaatcgccggcgaccaggaatgggcgcatgcgatgcaggcgacgtcgtccctgtcgaacgccgcgaccttgagcagcaccggcaaggtcgtcaatacgctcaagatccagatgaacccgatcgatctcggccttgtcaccgccacgctgcggcttcagggcgatgcgttgagcgtggatctcaaggtcgagacggccgccgcctaccggcagctcaaggacgataacaccaagattctcgagtcgctgcgcagtcagggctacgccatcgacggcgtgagcatcagcattgcgcctgtcgtcaacacggataccagcagccaggcgaacacgcagagcggcgccggtcagaacttcgcccaggggcagggcggagaagcgcgcgagcgtcagaatcaaatgggtcaacgcagtgccggaggtttcaatgtcacaggtgagggcgacgctacgggcgcttcttctggctcctctggcagcagcggtactggcgacgtatacctctgacgcgcgagcctccgatggcgcctgcgagcgggagatccagtcggcggcactgaaatacggtgtccctgagggtatcctctattcggtcggtttgaccgaaaccggccgcaagggctcgctctacgcgtacgccttgaacatagagggcaagcccttctatccgcgctcgcagcgcgatgccctgacgcagttcgacacggctctgaggtcgggcgcgaagctgatcgacgtgggctgcatgcagatcaaccagttctaccacggcgagaatttccgctcggtggaggacatgctcgacccgcgttcaaacgtcgagtacgcggcgaagttcctcaagaacctgcgcaaccgtcacgaaacgtggaccatggcggttgcgcgataccacgccggccccaacaatgaccccgcgcagaagcaatatgtctgccgtgtcatcgccaacctggtggccacgggctatgggaaatggactcccaatgcgagcaatttctgccgcggctgactcgcccaaagatagcgaaaaaagaacaaatcggaaatgtgtcataatgtggcgggaatccggcccaatgtggcaaggcaagtcacaatttaggacatgttaacttttccacgaaacttttgtgtgtataatcgagtgtacccactaaatgtagagcaaatcggggggcaaatcttaatcaactattaatttccgccagtgagttcctacagcttgtcccagaatcgtgcgattcgtacccataggtcatcgatgtgccacaagtgattcggaggcggacgaatgatcgtagtggttgatgagcgtgagctcgtgaaggatggctacacttccctttttggtcgagaaggcattccttcgaccggttttgatccaaacgagtttggagagtgggtgcagacggctgccgattcggatatcgcggcggtcgaggcgtttctgattggccagggacagcagacgttcgagctgccgcgcgccattcgcgatcggtcgatggcgcccgtcatcgcggtcagcgaccagccgtcgctcgaaaacacgcttgcactttttgattgcggcgtcgacgacgtcgttcgcaagccggttcacccccgcgaaattctcgcccgcgcagcggccattcgccgccgcctgaaggcgatttccacgcacacggatatcggcgccatccgcgtcttctccgatggccgcgatcccgagatccacggcgaagtcttcgcgctgccgcgccgcgagcgccgcattctcgaatatctgatcgccaaccgcggtcgtcgcgtcaccaagacccagatcttcaacgccatctacggaatcttcgacgaggaagtcgaagagaacgtcgttgaaagccacatttccaagctgcgcaagaagctgcgcaagaagctcggcgtggatccggtcgattccaagcgcttcctcggctactgcattgattgggaatagtttttttaatgcccgttaccggccggcggtctagcttcggatctttttcggatcacgtaaaagccagacagcttcacgcaaggcccgccggatactctcaagcctactaaggaaatcgaggttttcagatgagcattttcggcagcatgaagacggcggtgtccggcatgaacgcgcaggcgaaccgcctgagcaccgtggccgacaacatcgccaacgtaaacacgtcgggctacaagtcggtgtcgaccgccttctcgtcgcttgttctgccttcgagctcgggcaactacaattcgggcggcgtacagacgtcggttcgccagtctgtctccgcgcagggcgatatctctttcaccacctcgggctacgacctcgccatctccggcgacggcttcttcatcgtcgagagccccgatggtgttccggtcctgacccgcgccggcgacttcacgaaggatccggacggcaacctcgtcaattcggccggcttcaagctgatgggctattcctacgattccggcgcgccggcagtcgtcgtcaacggcttctccggcctggttccggtcaacgtcgcccagtccgggctgacggcgatcgcctccacggcgggcaccttctcgggcaacctcaattccggcgcagcgatcgcgacaggcaacctgccggccgacaacgtgctgcccatgaccaccgataccaagcagatttcgatggtcggctacgacaagctcggcaacacggtgcaatacgacttctacttcacgaagacgggcgtcaccacgccgccgcctgcaaccggcgccgcgagcacctgggatgtcacggtataccgcaatggggacgccgcgaccggcggcaccacgtccttcccctattcgtcggacgccgttggtagcggcacgatggagttcgacgcggaaggcaagcttattaccggcggcacgctcctcatcgacgatccggtcacgacaggccagatccagatggatctctccggcttcacgcagcttggctccgatttcgccggcaagggcacgccgaacggccaggccgcgagccctgttgacaccgtgtcgatcggcaaggatggcactgtttccgccaagtacgcggatggaacgtccaagccactgtaccggattcccctcgcaacggtcgcaagcccggacaacatgacgctcatgagcggcaacgtctacagcgccaatggcagctcgggcgttacggtcaccggcttcccgcagaccagcggcttcggctccatccaggccggtgcgatcgaaagctcgaacgtcgacctcgccggcgaactgaccaagatgatcgaatcgcagcgcagctacactgccaattccaaggtgttccagacggggtccgacatcatggacgtcctcgtcaacctcaagagataagtagggtaacgggtcagccatgtcgctcacgtccgcacttaataccgcgcagagcatattcaataacaccggcactcagagcagtgtcgcgtcgaacaatatctcgaattccagcaacagcgattacgtgcgccgtcaggcgatggtcacgacgtcgctgaatggagcgcaggttgtaaagatcagcagggctcaggaagacgccctgatgcggcagtggctgtcggccagcgcgggagacagcgcccagcagaccttgctgagcggcctgaccgacctgaagtcggtgctcggcggcaatgactacgagacgtcgccggccacctatctttcgaccttcgagcagaagctccaggcattccgcacctcgccgagcagcgtgatcgcggcgcagagcgcggtcacggccgcgcaggacgtcgccaattcgctgaacagcgccaccaagtcggtccaggtcattcgccgggacgcggacaaggacatcgccacccaggtcgatacgctgaacacgttgctggcgcagttcaagacggcgaacgacgccgtcaagggcgcgaccgccaccggcggcaacacggcggacgcactcgacgaacgcgacaagctgctgaagcagatttcctcgatcgtcggcgtcaagaccgccgatcgcgccaatggcgacatggcgctctataccaatgacggaacggtcgtcttcgacaccatcccgcgtgcggtcacgttcgtctcgcaggatacctacacgacgggaaccaagggcaacggcgtctacatcgacggcgtggcgctgaccagcgggcaggggtccacgacgacggccaagggcagccttcaggccctgctgcagatccgcgacgaggtcgcgcccactttccaggcgcagctcgacgaaatcgccaagtccctggtgacgacgttctcggaaaccgatggcacgacgacgcagccgggcctgttcgtctggaagacgtcgaccgggcttgacggcgacacgccgacgacccctgatgtcatcaacggcatcgccggtacgattacggtaaacacagcggtaatcaccagccagggtggtgatccgatgaagctgcgtgatggctcgatcaccgggttgaccaatctcaacacggacaacgccagcggcttctccgacaatctcgacgccttgtatgccgcgctgggctcggcgcagacgttctcgtcggatgccggcatctcctcgaatgtcagcgtcatcagctacgcgcagaactcggtcggctggctcgaacagctgcgaagcgacgcaacgacggcatcggaaaatacaagcgctgccctgtcgcgctcaaccgaagcgtactcaaatgagacaggcgtcaaccttgacgaggaactgacactgctgcttgatattgagcagtcttacaaggcggcaaccaagatactcaatgctgtcaacgagatgtaccagtcgctgctggacatagcgaggtaagccatgaaaagttcatttatttctagttcggctattcaaaacgcgatgcgattgaccattcgcgaatcgcagacccaactcgtcaaatcctcgcttgaagcgacaaccggcgtttacgccgacatcggtgcctcgctcggctccggcgccgcgaaaagcgtgaacttcagcaccgaagtcacccgtatcaaggcactgcagggcagcaactccgtcgtctcgggtcgtcttgaagcctctcagctcgggttgaccagcatgaagacggcgggcgacgcgctcgtctccaagctgaccgcgctgcagggcagccaggacaagaccagcatcaccgtcgcgatgcagtcggccggcgacgcgctttcctcgctgatggacaccggaaactcgatgctgaacggagagtatctgttctccggcatcaacaccgatgttcagccgctgacggatcagtcgaccaccgcgaccgccgcgatccaggcgaatctcgatgcctgggcaagcagcctgggcaagaccaagtcggaactgaccggcgacgagatggacacgttcatctccaacttcgtcgagccgatgttctcgcaggatacgctgaacgcgacatcgacgccgctgccgttcccgccgatcggcgttggagcccccacgccgccgctggcctatgtgacgccgccggcatgggctgactggtcgagcgcgtccaaccagaacatgacgagccggatcagcaactccgaaaccgtcacgtcgtcgaccaattccaattccgaaggcatgcgctacttcgcgctggcttccatgaccgtatcggcccttgccggcgtcggcctcagcggcgacgcgctggcgatgacgacatcgaaggcgatcggcttcgccgcgcagggaacgaccggtatcgtcacccaggcgagccagctcggtctgtcgcaggagcgcgttacgaaggcgaacgacgctctcgatgcgcagtccagcatcattcagaacaagcttgtcgaccttcagggcgtcgaccagtcggaggcgtcgacgcgcgtgaacacgctgcagacgcagctcgaaaccgcatacacgatcgtttcaaaaattcagcagttgagcctcgtgaactacctctgatgatcagaggcagaagtacaagtacaaagaaggatgcatgaatgtatcagttctcttatgccgaggtcatgcaagactcggtggccgatgcgaaggagcgggagcgtcaagttctcgaccggtccatcgagcttctcgcgattgcacgggacagagagaagtatggccgggaggccatcgatgcattgttttacacccgacgggtttgggtgagttttatcgaagacctcaagcatccggataatcagctcgaagttcagttgcgcgccaatctgatttcgatcgcgatctggatactgaaagagagcgaccggatccggaaacggcagtcgaccaactttcagggcattattgacattaccaccatcatcagggatggacttaaatgaaaagcacgcttcgcatctcgctaaaagccggggaaaaaatcttcatcaacggcgcggttttgcgcgtcgaccgcaaggtcgcgctggaattcctgaatgatgtcacgttccttctcgaaaaccacgtccttcagccggaagacgcgaccacgcctctgcgccagctctacttcatcgcgcagatgatcctgatcaacccggagggcaaggatcagtcgacggcgatgttccgcaagtcggtgacgatgctcctcacctgcttcaagaacgaggaagtcctggccgagctgaagcgcatcgacggtctcgtttcgaccggtcgcgctttcgacgccttgaaggccatccgcggtctctacgtcatcgaagacaacattctgaacaaccaggaaatgcaccctgcgatggttgagcagattcgcaaggagatcgcaccatggcggtaggcgcaacaggttccgcgacgtccacgcagaacacgacgacaacgacgtcctcggcccagaagaaggcgtcgctcaactacgacaacttcctgcagctcctcatcgcccagctgaagaaccaggatccgaccagcccggtcgatgccagccagcagatggcccagctcgcgagcttctcgcaggtcgagcagacgatccagacgaacaccaagctggatacgcttctgtcgagctcgagcctgacgcaggcaagcagctatatcggcaagtacatgaccagcgccgatggcaccgtcgccggcaccgtcgcgtcggtaaaagtctattccgacggaattatcgcgacgacctccgatggaaagagtattcttgttcaggcgggaatcactctcgctgatcaggcgccgccgccgaagacgaccggcagctgatcgacaagaaactgaacgacggtccggccaccacgtggacggaccgaaaggcgatatgaggttgcctggatgaatgaagctgacgcactcgatctgttccaggcggcgatctggaccgttctcgttgcctccggaccggccgtggccgcggcgatgatcatcggtctcgtcatcgctctgtttcaggcgctcacccagatccaggaagcaacgctcaccttcgtcccgaagatcgtcgccgttctggtgacgattggcctctccgctcccttcgtcggttcgcagatttccatcttcaccaatctcgtcttctcgcgcattcaatccggcttctgagccaccctcgcgcaagcttcgccatttaactgtcgatccgaattggtgggcatcatgcccgcacctctcatgaagagatggaatcgatatggcgcaaccacccgcactcccccttccgaaatccggtcccagcatacgcgacgtcggctttgcccttggcatcgtcctcatcatctgcgtgctgttcctgccgatcccgccgtttctcatcgacatgggtctggcattttcgatcgcgctgtcggttctcatcctgatggtcgcgctgtggatcgagaagccactcgagttctcgtccttcccgaccatccttctgatcgccacgatgacgcgcctgtcactcaacatcgcgacgacgcgcgtcattctctcgaacggaaacaagggcgaggaagcggctggaggcgttatcgccggcttcgcgagccttgtcatgtcgggcgacttcgtgatcggtttgatcgtcttcctgatcctgatcaccatcaacttcatcgttatcaccaagggcgcgacccgtatcgcggaagtcggcgcccgcttcacccttgatgccatccccggcaagcagatgtcgatcgacgccgacctgtcggccggcatcatcgacgagcgcgaggcgcagcgccgccgcaaggagctcgaagaggagagctccttcttcggcgccatggacggtgcatccaagttcgtgcgcggcgacgccatcgccggccttctgatcaccgccatcaacgtcttcggcggcatcatcatcggctacttccgccacggcatgccgatcggcgaagcggccgacgtttacgtcaagctctcggtcggcgacggtctggtgtcgcagatgccggcgctgatcatctctctggccgccggccttctcgtctcgcgcggcggcaccgtcggttcgaccgacaaggccgtcatcggccagctgagcggttatccgcgcgcgctctcggtctccgccgtgctgatgatcatccttggcctgatgcccggcctgccgttcattccgttcatgttcctcggcggcgttctcgccttcggcgcctggttcatcccgcgccaggtcgatgcggaaaacaaggttctgcgcgaggaagaggaaaagaaggtcgtccagaacaaggaactggagaaggactcggtcaagtcggtattgcgcacgtcggaaatcgaactggcgctcggcaagatggtctcctcgcgccttctcggcgcccaccaggaactcgccttccgcgtcggcaagatgcgcaagaagttcgcgacgcagtacggcttcgtcgttcccgagatcaaggtcaccgacgatatcggcatcaccgagaagtcctaccagatccgcatccacggcacgaccgttgcctccaacgagctgcgtgtcggcgaagtgctcgtcgtcaccggctccggccgcaagccgcgcgtgcccggcgatgacatccgcgaacccgctttcggcatgcccgccgtctcggtgctcgaggcattcaccgaggatctcaagcgcgaaggcttccagccgatcgacaacgtctccgtcgtcctgacccacatgagcgaggtcattcgcaacaacctgccggcgctgctctcctacaaggacctcaaggttctgatcgatcgtctcgatcccgagtacaagaagcttgccgacgagatctgctcctcgcacatgtcctactctggtctgcaggccgtgctgaagctgcttctggccgaacgcgtctcgatccgcaatctgcatctcatcttggaagccgtggcggaacttgccccgcacgtgcgcaagaccgagcagatcgtcgagcatgtccgcgtgcgcatgtcgcagcagctctgcggcgaccttgccgacaacggcgtgcttcgcgtgttgcgcctcggcagcaagtgggacctcgcgttccaccaggccctgaagcgcgacaacaagggcgaagtcgtcgaattcgatatcgatccgcgcatgcttgaggaattcagcgaacaggcgagcaaagtaatccgtgaattcatggaccgcggcctgcctttcgcccttgtcacctcgccggaaacacggtcctatgtgcgcatgatcatcgagcgtctgttcgccacgctcccggttctttcgcatgtggaactggcgaagggcatcgagataaagattctaggctctatttcatgataactgacccgcaagggaccgtgttggcactctttctgatcttctgcaggatcgggggttgcgtgctgacgatgccgggcttttcgtcggcgcgtgtccctgcggttctccgcgttttcatctcagccgcgctttcgctgtcgatcatgccggtgctctgggacacggtctacccggcggttcgcacctcgaacgcgacctatatcggtttcatcttcagcgaatcgctgatcggcgtgatgttcggaatgctggcccggctctatacgctgggcatgcagttcgccgccagcatcgtcgccatgatgatcggctacacgcagccgagtgcgtccgatatctttgaagacggccaggaaagcgcgctttccggcttcatcatcttcgccggcatgatgatcctgttcatgttggattttcaccacctcgtcttcagagggctgatcgattcctacacctcgatgccgttcggcggcgtcatgcagatgcgcagcacgctgatttcgttcaccgatacgctatcgacgacgttctccatcatgctgcggctttcgagcccgttcctcatctacggattgttgttcaacgtcgccatcggcttcatcaacaagctggccccgcagatcccggtctacttcatctcgacgccttacctgctcttcggtggcctctttctcttctacttctccgttgcggcgatgatcagccagttcggccagtccttcaccaccgtgttcatggggcagtaggccgatggcggaaaagacgcgctcggacaagctcaggcgcctcgtcgcggtccagcggcatctggagcagatggcggagttcgatctcgccgaaacgacgcgccagcgcgccgaggtcagcgaggagatggacagcgtcatccatgcgctcggctccatggatccggttcatcacgctttttcgcaaggctatgccgaccgcttcagccgcctcggcatcaaggacaagcagctgaccggcatgcaggaagttcaccagatgcgcgtccagcaggagcgcgccaagggagaccggctggaagacggcatgcgcgaggcactcgatgacgagcgccgcgaggccgacgacaacgcggtctatgatatcatcgatcaaaaatacggtacgccagcctccagcaagcttcaaaaatcataatcgcttcgatctgaaatcaagaggattatgacgtggctatttcacccccgagtgatctggttctggacgttgtcagggcagccgaccccatggaggtccaggccgctcaggaaaaactgaaggcaaaccaggctgctttcgcggccaatagccttgccgaagcgggcaagggcttcacctcggcggtggacatactcgatcgcgcctccagcaaggccggcctcggcgacgtcaacaatcgcaccgacaacacgacgcaaatccccgagtcctatcgcaagttcgaagcgatggtgctgcagaacttcatcaagagcatgctgcccagcgagagcgaagaggtctacggcaagggcgccaccggtgacatctggaagggcatgatggccgaacagctcggcaacaccatcgcaaagggcgatggcatcggcgttgccaagcagctttatcaggacgctttgaagaagcaggaaggtagggtcaacgcctccaccgaccagaacgatcgcagtgccgcggtcaacatgatcaatgaaatacagcgccagacgtttggcgtgacatcgacggacaacaagtccgcaaacgacgcctgagggaatcgaggaaaacaatggaaataatctcgaacgaataccgtatcaaatcggttcttggacgcctggaaatgatcatcgacaacgagaacgctcgcatcggcagcgatccgcagttcgatctcaaggtgtcgaatgcgcacaagagccgctgcctgtatgagctgtcgatgctcttcagcgataccgatcccaaggagctcgccgcttcccacctcgaacagttgcatggactgaaggaaaagctggcgctgaacgcccgtcgcgtcgaggctcatctcgaagccgtgcgcacggtcgccgacctgctgaagaatgcggttcaggacgcggacgccgacggcacctattcgcaggaacagttcctggcgcgtgaacactgatgattaaactcgttcttacaggcgtctgggtctgcgtgatcacgctggcggcggtctatatgtcggtgacgctggcaacggcgccggctcccgcccccgatcagtcgaagcagagtctcgtcgagcttgtaaagggcgagtcgatcaccattcctgtcgtcaaggatggcgccgtcagcggctatttcctcggaaagctatccttcatggtcaacaaggagatggtgaagggcgcgaccctgccgctcaccgaaatgaccaccgacgcgctcttctcgctgctcgtcggcaacaagatggtcgatatcgccaacatgaagtcgttcgatccgattgccttccgcgatatggtcaagaaagacctcaacaccagcctgggcggcgagtacatcgatcaggtattgctcgagcagctcgactatctctccaaggaagaggtcgccgccaacgcttccggccagccgaagaaaacaggcaagccggtcaatgtcgtcccgcccgagcccgtcaaggacgctgccgccggcggctgacgaccgcttttcgtcgcggtgcccgcgtcaccgcgaccagccgtccgtcgtggttaacaaatccctgatatcgccgggaaaaatagaccggttttcctaaaggttgtttgacggcggcctgttataccgtcccgcgatgggccgacatgcgcgccgccttccggatttggaagccggcgtccgatccaggcagacctcagtgttcccgggatctccgagccatgaagcattatcgtcaggaagcgggtatgaacctgatcgcgaatttcgcggtcctcgcctctcgtcgcgccattttcgatctgcctgtctgcgatctgggttgggacgatgcgctcgtcttcatcaacgagctactgtcgatgcccgtcggccagacgtccatctccttcgtcaacgcgcacaacatgcttctggcgctgcgtgacgaggaatatcgcgacatcctctcgcagaacctcgtcctgccggatggcatcggtctcaacatcgcgtcgaagatcgcgcacggatcgcctttcccggccaacctgaacggcaccgatttcgtgcccgcgctgctgaccttcatggagcagccgcgccgcatcggcctgatcggcggcacgcgcgccgtggtcgagcgggcggcggtgaatttccgccggcatgcgccctggcatgaattcatcgtgatttccgacggcttcttcgacaagaacgagccgtccgccgtccttgccgaggtcgccgcgcaggatctcgacattgtcatcgtcggcatgggcacgccgttgcaggagaagtgggcgcacaagcacattcgcgccgatcacgcgcgcctggtgctgaccgtcggcgccctgttcgattttgtctccggctcggtgccgcgcgccccgaagctggtgcgctcgatgcgcctggaatgggcctacaggctcgtccaggagccgggccgcctctggcgtcgttatgcgctcggcatccccgcctttctttatcaggtcgccaagtatcggttcagccgccgcaaggtcatcctgaagcgctcggaaatcggcgacgtcagtcgagattgagcgaaaattaaccttttgtttgccaagcctgtttaggctcgattaaccacacgcgactgcgatgggttcgatcgttccatgcacgagacttggtgatgcgcgaaaatcattcgagacgtcccacccattcatggccatccgcgccgagagatgaagccggctcgaaccgtcttgacgcggaccactccccgctagaattggccgtgcctgaagcggagttgctgcgggtcatcgaacgggcccttcaggcgcagcgaatgccacaaccggaagagcctgcgccgcgggacgtcaccccacttctcgtcagccgcatcgaaaccattctcggcaagaggctcgaggctgccaatgatggcgccaccccgccgaagccgccgctcgacaacgccgcgccgaatgccgccgtccctgacgccggtgccccgcacgccgctgcccctgacgccgcggcgatggacgatctgatagacgatctggctgcgcaggaattttgcgtcgaatcggcagcgcacccggagatcgagcatccggcgccggcattccgccgcagccgccggtcgctgatcgccgccggcgcgctttccgcgctgggcgctcttgcaggagcgatgatcccgggcgagccatccggctttcgggcgcaaagcctgctcggcgtcgagggggccgccaaggaccggccggcccttgtcacagcggcgcacgatgccttgctctcgcagaaaacagtcgcgaccgccgtggccagattgaggctcgaccgcgacgctgagttcgccggcgccagcggcagcgcattcaatgtcgtcgtcgatatcctgtccgcgagcggcgttgccgccgatccggtctcgcgcgccgaggcgtctctcgccaccgccattcgcgcctcggcggatccgaaatccggaacggtcggtttcagcgtcacgacatcgagtgctgcgaaatccgcgcgcatcgcgtcctatctcgtctcgaccgtagccaatcccgcgtcgaccgcgatcgtcagcgacagcgcggcgaagaacgcaagcgcgcaggccgacgccgaactggatgctttcaccaagacgaacggccagggcaatgtcgaggttgcaacccggctgcagcagcagcttgtcgaggccaacggcgccctgcaggacgcgcagcagaggatcgtggcggcaaaggcgcgcgccgacctgctgaagaccgcgaccgccgacgatgccctgaccggcgcgctcgccgccgaaatcacctcgccggcgctggacgagcgccgtggccgctatgcgctggccaagtcgacgctcgcgcagcttgccgccagcctcggtccccggcatccgcgtctgatcgcccagcaggccgaggtggatggcctgcacgacagcatcggacaggagctaggcaggctgtcgcgcgatgccgccgacgaagtcaagtcggcggtcgacgctgtcaggcagcttggcgaccagagaaacacgctgatcgcgcaaagccgcgacaccggcgtcgatctcgccaagctgacggaactgcgcgaaaaatcggccgcggcgcgccagcgtcttgaagatcagctcagcaccggcgcgatcggcgccgatggcccgccggtgcgggtcatcaaggcgcccgtcgtaacggccgtcgaacccggccgaggcccgtggctggccccggcactcggcgcgctggctggccttgccttcggtcttgcgggcttcaggcgacgcgtggatgcgggcaagaccatcgcgcacagcgagccggtcgccacgatcgagccgtcggtcgatatcccgcgtcagcctgtgtcggagcccgtggccgagcacgccgccgacgaggtccaaatcctccgcgccgagatcgccgccatgcgcgaccgcctgcgctcctacgccgcgacggcctgatcgtcacccacctgcggcatgattgtacttgcatttctcgtttcaggcaggatagggcgtggacaggcaaattgtgtctgatgccgccgactagaatggcggcgtagtggcagggagacggtcttggcgacagtaatcgacggcaaacaggttgcagcttcggtcatcgacacggtgaaggcggcgaccgctgcattggaaaagcagagcggtgttcagaccggtctcgcggtcatcatcgtcggcgacgatccggcaagccacgcctatgtgaactcgaagagcaagatggccaaggaatgcggtttcatatccgtgcagcacacgctgccgattgagacgacgcaggaagagctggccgcgctcgtggcctcgctcaacgccgatgacacgatccacggcatcctcgtgcaattgccgctgcccaggcacctgaattccgagccgatcatccagtcgatcctgcccgagaaggatgtcgacggtcttcacgtcgtcaacgccggcaagttggcggtgggcgatctgcagacgggtctggtttcctgcacgccggccggggccatggtcttcgtgcgccgcacccacggcgaggatctctccggcctcaacgccgtcgtcgtcggccgttccaatctgttcggcaagccgatggcgcagctgctgctcaacgccaacgccacggtgaccatcgcgcattcgagaaccaaggatctcccgtcggtctgccgcaacgccgatattctggttgccgccgtcggtcgtcctgagatggtgaaggctgattgggtcaagcggggcgccaccgtcatcgacgtcggcatcaaccgcatcgccgcacccgaaaagggtgaggggaaaacacgcctggtgggcgacgtcgccttcgccgaggccgccgaagtcgctgatgtcatcacgcccgtgccgggtggcgtcggtcccatgaccattgccatgctgatggccaacaccgtcatcgccgcgcatcgcaccgccggccagacgccgccgaagttttgatcgagagacacgctttagcgcggcgccgcgcccgtcgacgcccgcacgatcagctccgtcttccagagttcctgttccgggaaggggccgtcctgcttgacggtcccgatcagccgctcggcgatccggacacccgccgcgcgcagcgatgagcgcgtcgtcgtcagcggcacggagaaattctccggcttcagatgcggcagcacgtcgtcatgggcgatcagcgaaatatcctcgccgagcttcagccccgcctgcgtcaccgcgcggatggcgccgagcgccagaaccgtgctggaacagagaatggcggtcggcggctccggcagctgcaggaagcgctccatcgcgaattgcccgtgctcgtcggtcatcgacatgtggctgacgcagctctcgggcagttccagcccacgttcggcgagcgccgcgacgacgcccttcttgcggcggatcgcgaaatccagatgctccggcccgtttagcaggcagaaatgcctatgcccgagctgcagcaacagccgcgtcgcgtcatagaaggcaccctcgttgtcgatgtcgagatagggataatctggctcggtgccgaacgagcggccatgcaccagaaacggcatggacagcgatttcaggagcggcagccggggatcgtgcccgcgcatgtaggcgacgaacagcgcatccacattgccgctgatcgcgagccgcctgagcgcgcccacctcatcgtctggatcggccggcatgatgacgaaatgaaagtcgtgccttaccgcttcctcgccgagcccggtcaggaattcgccgaaatgcacgtcggaataatgcccgggcgcggtgggcatgacgaggccgatcgagcccgccttgccggtcgccagccgctgcgcggccttgttcggccggtagccggtctcctgcacggcgcgcagcacccgctcgcgtgtcgcctcgttgacctcgggataaccgttcagcgcacggctcaccgtcgtctgggacaggcccagcatttccgatagctgtttcagattcacgtgttaaacttcctccacacgccctggaggtcatctctcccaaatggcatccaaagcgcttttgttaatgtagcagctgtcaagcttgactcaagaaaaatcgctccatatttccgttcaagccttgctgcatcgccataattcgcggctccaaggcaggttttgcgaattgccttgactcttttgtgccgaaagtgaaatgagttcgttgtcaaagcgctttggaatttcgattgcaaggcgtgattgggattgtgatgggaggttgatcacatgaaaaagtcatttttgatgggcgttgccatggcggcgcttctggccggcggcgcgtccgcggccgatctgaaattcgcgccgggcgaggacagcaagttcaactggaagagttacgaggacttcaaggcggccaatgccgaccttaagggccaggagctgacgatcttcgggccgtggcgcggcgaggacgaggcgctgttccgcagcattctcgcctatttcaccgaagcgacgggcatcgacgccaaatattcgtcctcggaaaactacgaacagcagatcgtcatcgacacgcaggccggttcgccgccgaatatcgcgatcctgccgcagccgggccttctggccgatctggccggcaagggcttcctggcgccgctcggcgatgagaactccaagtgggtcaaggacaattacggcgccggcgacagctgggtcggctacggcacctacaagggcaaagacggcaaggaagccttctacgccttcccctacaaggccgacgtgaagtcgctggtctggtacgtgcctgaaaacttcaaggaagcgggctacaaggtcccgacgacgatggaagagctgcaggctctgtccgagcagatcgtcaaggacggcggcgttccgtggtgcataggtctcggttccggcggcgccaccggctggccggcgaccgactggatcgaagacctgatgctgcgcatgcagccgccggaagcctacgacaagtggaccaccaacgaactgaagttcgatgatcccgccgtcgtctccgtcatcgacgagttcggcaagttcgccaagaacgaggcctatgtcgatggtggcgtcaaggctgttgcctcgaccgacttccgcgacagcccgaagggcctcttcgccgtgccgccgaagtgctacatgcaccaccaggcgtccttcatcccgtccttcttccccgagggaacgaagctcggccaggatgccgacttcttctacatgccgaccttcgcgtcgaagcctgaactcggcaagccggttctgggtgctggcacgctggtcacgatcgccaaggattccaagccggcacgcgctttcgtggaattcctgaagacgccgatcgcgcatgaagtctggatggcgcagtcgagcttcctgaccccctacaaaggcgtcaacacggccgcctacgccaacgagcagatgaagcgcgaaggcgaaatcctgacgacggcgaccaccttccgcttcgatggttccgacctgatgcccggcaagatcggcgccggcgccttctggaccggcatggtcgatttcgtcggcggcaagtcggctcaggataccgccaaggaaatccagagcgcctgggatggcatcaagtaacatcgcctgatctccatgccgcctgctcgggcggcgtggatgtgaatgtctggccggacgccgtcacaagcgtccggccatcgccgccccttgcgcccgctgccagcgtgcccggtcgtcaggcggcgtgatttcaagaagacgtagacatcaggggagggatgaatgctatcgcagctggtttccgctttgggggtcgtggtcgtcgccgtattcgcttgcgcggcctatttctatttctcgaacaagttcctggatatggcgctcccggtgagggacggcgacatcaccgccgcctcgcgaaacctcaaccgccgtgccgtcatccggccgtggctgttcctgttcccggcgctcttcctgctggtcgtctatctcgtctatcccgtgatcgcgaccgttatcctgtccttctacgatcgctccggcgtccagttcgtcggcttcagcaattaccagtgggcctttaccgaccgcgaattccgccagtcgatcttcaacaacatcctctggctcgccgtcgtgcccgctgcctgcaccttcttcggcctcgtcatcgccgtcatgaccgaccgcatctggtggggcaatatcgcgaaaagcatcgtcttcatgccgatggcgatctccttcgtcggggcctccgtcatctggaaattcatctacgagtatcgcggcggcaacgccacgcagatcggcctcctgaacgccatcgtccagctcttcggtggcacgccgcaggtgtggatctcggtgcccttctggaacagcttcttcctgatgatcatcctcatctggatccagaccggctttgccatggtcatcctgtcggcggcgctccgcggcatcccggaagagaccatcgaggccgccgtcatcgatggcgccaatggctggcagatcttctggcgcatcatggtgccgcaggtctggggcacgatcgcggtcgtctggaccaccatcaccatcctcgtcctcaaggtcttcgatatcgtgctcaccatgaccaacggtcagtgggacacgatggttctcgccaatctcatgttcaactggatgttccgcggcggcggcgacagcggccgaagcgccgtcatcgcgctgatcatcatgctggccgtcacgccgatcatggtgtggaacgtccgccgcgccaatcgcgaactgggaggcaagtgagatgaccctgacccgcgatttcttcaagatcggcccggcccgtctgttcgtccacgctgccgtcctcttgatcgtcatcatctggttgatcccgacgctcggcatcttcgtcagcgcgttgcgcgacaaggaccagatcgtcgtttccggctggtggaccgccttctccggctcgtcgcgcaccgtcgccgtccgcctcggtcaggtcgaccagcagaagcaggatggcccggcctatgtcatttcaggcaatgtgctcgaaggccaggagggacgttcgatcaatgccttcggcacccgcgtcgctcagccctcggcctacaaggccggcgagaccgccgatctcggcgatggtctctcgcttgtcgtcaacgaggacggcacctatcgctacgccaagaacgccgccttcgggccggacgatggcggccgccgcgtctatatctccgtcgccacgccgccggaattcaccctgcagaactatcgcacggtgctgacgggcgaggggatcggccagtccttcatcaactcgctgacggtcaccatcccggccacgatcatcccgatcctgatcgccgccttcgccgcctatgcgctgagctggatggaattccccggtcgcgcgctgctgatcgcgctggtcgtcggtctcatcgtcgtgccgctgcagatgtcgctgatcccgcttttgcggctctacaatcaggtcggcatgctcctcgatacgccgtccaagacctatcccggcatctggctggcgcacaccgccttcggcatgccgctcgccatctatctcctgcgatcctacatcgcgggcctgcccagggagatcatcgaatccgcccgcgtcgatggcgccagcgatttcgagatcttcacccgcatcgttctgcccctgtccttcccggcgctcgcctccttctcgatcttccagttcctgtgggtctggaacgacctgctcgtcgccatggtcttcctcggcacggacagggaacacctcgtgctgacgggtgcgctcaacgcgttgctcggctcgcgcggcggcaactgggaaatcctgacggcctcggcattcatcacgatcatagtaccgctgctcgtcttcttcgcattgcagcgctatctcgtgcgtggtctgctctcgggttcggtcaagggcggctagtcatttcccaggacactcagaagacaatatccaacaggaccacatatgagcatggcatctcaatccaacctgacggctgacaaggactggtggcgcggcgcggtgatctaccagatctatccgcgctcctatcaggacagcaacggcgacggcatcggcgatctcaagggcatcaccgcgagattgccgcatgtggccgcccttggcgccgacgccatatggatctcgcccttctttacctcgccgatgcgcgacttcggctacgacgtctccgactacgagaacgtcgactcgatcttcggcacgctggttgatttcgattccctgatcgccgaggcacaccgcctcggcatccgcgtgatgatcgatctcgtcatctcgcactcttccgatcagcatccctggttcgtcgagagccggtccagccgcaccaacgccaaggccgactggtatgtctggagcgactcgaagccggatggcaccccgcccaacaactggctgtcgatcttcggcggttccgcttgggcgtgggacccgacccgcatgcaatattacatgcacaacttcctgacctcgcagccggatctcaacctgcataatcctcaggtccaggatcgcctgctggatgtcgtccgcttctggctgaagcgcggcgtcgacggcttccgcctcgacacgatcaatttctatttccacgacaaggaactgcgcgacaatccggccctggcgccggagcggcgtaacgcctcgacggcgccggcggtcaatccctacaatttccaggaacacatctacgacaagaaccgcccggagaatatcgccttcctgaagcgcttccgcgcggtgctcgaggagttccaggacatcgccgcggtcggcgaagtcggcgatagccagcgcggtctcgagatcgtcggcgaatatacgtccggcgacgacaagatgcacatgtgttacgccttcgagttcctgtcgccggacccgctgtcgccggagcgcatcgaagacgtgatgaacgatttcgccgccgccgcccccgatggctgggcctgctgggcgctctccaatcacgatgtcgtgcgccatgtgacccgttggggctcgctcgttgccgatcgcgacgccttcgccaagcaatatgcggcgatgctgatgaccatgcgcggctccgtctgcctctaccagggcgaggagctcggtctgacggaagccgatctcgcctacgaggacctgcaggacccttacggcatccagttctggccggagttcaagggccgcgacggctgccgcacgccgatggtctgggacagccaggtcgcccagggtggcttctccaccgtcaagccatggctgccggtgctggtcgaacatatcctgcgcgccgtcagcgtccagcagggcgacgagacctcggtgctggagcactatcgccgcttcatcgccttccgcaagcagcacccggcctttgccaagggcgagatcaaattcatggagccgcagggcgacatgctgattttcgagcgcgaatacggcaacgaaaagctgctctgcgtcttcaacatgagcgcgaccgaagccttggccgctctacctgaaggcaactggcaggcgttgacgggccatggtttcgtcagcaataactatggcgacaagatcgatatacccgcctggggcgcgtatttcgctcgtctcgcctagagacttctggaggaggagaactcgatgactggactgacactcaaggacattcgcaaatcctacggtgccgtggacgtgcttcatggcatcgatcttgagatcaaggagggcgaattcgttgtcttcgtcggtccgtcgggctgcggcaagtccacgctgctgcgcatgatcgccggtctggagaacatcaccggcggcgacatgtatatcgacgggcagctggtcaacgacgtcccgccttccaagcgcggcatcgccatggtgttccagtcctacgcgctctatccgcatatgaccgtctacgacaacatggccttcggcatgaagatcgccggcgagaacaagcaggaaatcgatcgtcgcgtgcgcgcggccgccgaaagcctgcagctcaccaagtatctggaccgcctgccaaaggcactgtccggcggccagcgccagcgcgtcgccatcggccgcgccatttgccgcaacccgaaggtcttcctcttcgacgagccgctgtcgaacctcgacgcggcgctgcgcgttgccacccgcatcgagatcgcccgcctcaacgagcagatggccgacacgacgatgatctacgtcacccacgaccaggtcgaggcgatgacgctggccgatcgcatcgtcgtgctgtccgccggcaatatcgaacaggtcggcgcgccgctcgagctttacgagcgtccggccaatctcttcgtcgccaagttcatcggctcgcccgccatgaacgtcatcccggccacgatcgccgaagccggcaacacgaccacggtcacgctgaccggcggcaagtccgtcacgctcgacattcccacggctgcgtccgagaaaggtaagaccgccagcttcggcgttcgccccgaagacctgcgcatcgccgcgccggccgacgaatatctcttcgagggcgaagtatcgatcgtcgaggcgctcggcgaggtgacgctgctctacatcgagggtctggtccagaacgagccgatcatcgtcaagctgcctggcatctacgatgtgaagcgcggccagaagatgcatttctccgccgatcgctcgaaactgcacctcttcgatgcggaaggtcgcacctatcgcaagtaagttgtaaatcgctcccgggccgtgtgaataatgcggcccggcgctatgctgttcgaaccttctgttaaagatcgcttggtagtctttcctgattgcgcattttgaggattactacagtggcgacaccgagcccccagtcatcgggacattttctaaacaaggaagaatccttcatgtacgaccgcgaagtgcggttcaagatggaggacacgatgaacgcggcgcgtctcgagtataccgagaagggcgtcatgaacatggcctcgcgccgttgcgacatcatccgcatttccaagagcagcgccgtcctggcgatcctcacgcagttcaatctcccgcgtcagttctatctcgatcttcccgatgcccgcatcagcaagatcggctgcatgctgacccgcgtcaacgccaacaacaccgtggaagtccgcttcctgcgcatgttgaccgacaaggaactgaacaagatcttcgtctacagcacccatccggcccatcgcgaccgcgtgctcgacattcgcggctgatcgctgcttgcagatatgaacgacaaggcccgcgagatcgtctcgcgggccttgtcgttttcagcggcagatcgcggcgctgctcagtggaagagcacgctggcgcccttgtcggatgcgccgacggcgcggcggaagggggcgaaaagctcgcggcccatgccgaattcgttgtccgagagatcggcgtcggcaggcttgcggtcggcgagcgtggccgcgtccacaagcacttcgagcgttccggcgatcgcgtcgagacggatgatgtcgccgtccatgatgcgcgcgatcggtccgccatcgacggcctccggcgtcacatggatcgccgccggaaccttgcccgatgcgccggacatgcgcccgtcggtcagaagcgccacgcggaagccgcggtcctgcagcacgccgagcggcggcgtcagcttgtgcagctccggcatcccgttggccttcggtccctggaagcggacgacggcgatgaagtcgcggttgagcttgccttccttgaaggcctcctgaagctcctgctggctgtggaagacgatcgccggcgcctcgatgacgtggcggtcgggcttcacggccgagatcttgatcacgccctttccgagattgccgcgcagcatcttcaggccgccattcgcctggaacggcgtttcgatgttcgcgagcaccttcggatcgacactcttttcaggggagggctcgcgcacgatgccgccatcctcgccaaggcgcggatcgatcgtgtaggcctgcagtccgtgaccgaacacggtgcgcacgtcatcgtgcaccaggccgtgcttcaacagttccttgatcaggaagcccatgccgccggccgcgtggaaatggttcacgtcggcaaggccgttcggatagacgcgggcgagcagcggcaccacctcggagagctcggcgatatcctgccatgtgagctcgatgccggcggcgcgcgccatggcgacgaggtgcagcgtgtggttggtcgagccgccggtggcatgcaggccgacgacgccgttgacgatcgagcgctcgtcgatcatctcgcccgcgggcgtgaactcgttgccctgcgcggtgatcgcgagcgcccgcttggtggcttcgcgcgtgaacgcttcgcggagcggcgtgcccggattgatgaaggacgagccgggcatgtggaagcccatgatctccatcagcatctggttggagttcgccgtgccgtagaaggtgcaggtgcccggtccgtggtaggacttggattcggcctccagcagttcggcgcggccgaccttgccctcggcgtaaagctggcgcacgcgcgacttctcgtcgttcggcaggcccgatgtcatcggcccggccggaacgaagatcgacggcagatgcccgaaggtcagcgcggcgattgtcaggcccggcacgatcttgtcgcagacgccgagatagagcgctgcgtcgaacatgttgtgcgacaggccgacacccgcagccatggcgatcaggtcgcgcgagaagagcgagagctccatgcccggctggccctgtgtcacgccatcgcacatggccggaaccgcgcccgccacctgcgcgataccgccggcctcggcggcagcctcgcgaatgatcgcgggataggtctcgaacggctggtgcgccgagagcatgtcgttataggaggtgatgatgccgagattggaaacatggtcgccagccagtgcttccttctcggcggcggaacagaccgcgaagccgtgtgccaggttcgcgcagccgagcgaggagcgaacgacgctcttgcccaccgcgtttcgcaatcgctcgagatagagctctcgtgacggtttcgaccgttcgacgatacggtttgtgatggcggcaacgcgcgaatgagcggacatgggaaatccttgtcgtttgctggtattcgattgtctgttcgcggcttcaggccgtatcggccacgagggcctgtcggcttatggagcccagtatatgtcgaccggcgtcgcggcgcggcgcaggattgcccggatcggcatctccgcttcgtcgccggcaccctcggccttggccagaacgtccttcttgccgtcgccttcgatatgaagaacaagcagccccgcatcctgcaggctggagaaggtgaaggtcaggcgtggttcgcccgcgccttccgcgtccatggtaatgatgccgcgtggcgttttcgggtcgagcgcgacagcaagattgctgccaccagggaagaacgaggccgtgtggccgtcgccgcccatgcctaaaatgacgacgtcgaacggattgccgatcgaagccgtggccacagtcgaaagccttgcggcttcctcgaccgttgccgccggctggtagagcggctggaactttgccgccttcgccttgttctgcaacaggttgccgatgacgagcagatggttcgagcgtggattgtcggcgggcacgaaacgctcgtcgacgagcgtgatcgtcaccttcgtccactcgagatcgcgcgtcgacagttcctggaagaacgccttcggcgtcgagccgccggaaacggcgatctcggccgttcccttcttggcgatggccgtcgaaagcgatgcagcgaccttgtcggcaaggttgcgcgccagttcggcggcgttggcaaaattgtgcatggtcgctgccatctctctcgatccttagaggttgtcgtgccaggtgcggccgtcacgctcgatgagcgcgatcgactggctcgggccccatgtgccggccgtgtagccctgaaccttctggccggtggattcccaacccttgaggatcgggtcgacccactgccacgccgcttccacttcgtcgcggcgcatgaacagcgtctggttcgaacggatgacgtccatcagcaggcgctcgtaggcgtcggggttacgaacctggaaggaatcggcgaagctcatgtcgagcgaaacctcgcgcaggcgcatgccgcccggaccaggatccttgatcatcagcgactgcttgacgccttcgtcgggctgcaggcggatgatcagctggttctggttgatgcggccggccgactggtcgaagaccgagtgcgggatcgacttgaaggtgatgacgatttccgacatgcggccggcaagacgcttgccggtgcggatgtagaagggaacgccagcccagcgccagttgttgatctcggccttgatggcgacgaaggtctcggtgttggagacgccgccttcgagctcttcgaggtaacccttgaccgggccgcccgccgaagcgccggcacgatactggccgcgcacggtggtctgctcgacattcgacgcgtcgatcggcttcagtgcgcgtagcaccttcagcttctcgtcgcgaaccgcttcggaatccatcgaggacgggacttccatggcgactaggcagaccagctgcatgatgtggttctgcaccatgtcgcgcagcgcgccggcggtgtcgtagtagcccgcacggccttcgaggccgacggattcggcaaccgtgatctgcacatggtcgatatggttggcgttccacagcggctcatagagggcgttggcgaagcgcagcgccatcaggttctgcaccgtctccttgccgagatagtggtcgatgcggaaaatctgctcttccttgaagaccttgccgatcgtgtcgttgagctgcagcgcggaagcgaggtcgcgaccgatcggcttctcgacgacgatgcgggtcgacttggtgatcagcttgtggtcgtggatcttctgcgagatgtcgccgaagatgccgggtgcgacggccaggtagaaggcgcgcacgcggtccttgccctcgtcgagcagcttcttcagctggtcccagccggcgtcggagcgggcatcgacgggcacgtagtacaggcgctcgcagaacttggcgacttcggcctcgttgtactcgcccttcttcaggtgctccttgagcgcgtcctgcgcgaacttgcggtattcttcgtgggtcagcgcgcttctggaagcgccgatgatgcgggtcggctcggagaactggccttcgatctgacgatgatagagggccggcagcaacttgcgctcggcaaggtcgccactgccgccaaagacgacgtaatcgaaaggttcaacgggaatgatttggctgctcatgaggctatctctcaatcagactggttcatggcctctttaatctaatcgatttaaaaaagccagtgtgcgctgcaacgaatttgtccggcactggttttagatcgaaaagccgcgtgaggaaatccgcaatctgactaaaacttgtcgcgcagggcaaaccaggaaagtgccaggaagagcaggggagcgcgcatcgcccgaccaccggggaaggccgggattttaagtgccttgaagagctcgagatcgccggatttcccgatcacggtctcggcgtagagccgtccgcaatagttggcaagcatcacgccgtggcctgaatagccgccgatcgaggtgacgccgggcataacctcgcgcacgaaaggctgcctcggcatggtgatcgcgaccgatcctccccaggcatgggtgatctcgacattgccgagttcgggatagatctcggcgatctggcggcggatatgctcggaaatatcgcgcggattgtcggccgtataggcctcacgccctccaaacagcagccgcccgtccttggattttctgaagtagcgcacgacgaaacgcgaatcggcgacggcctcgccgcccggaatgaccgaggatgtctcgccaagcggcacggtcgcgccgatgaaggagcggatcggcatgacatggcttgcggtgatcggctcgagattttcgatatagccgttgcaggcgatcagcgccttgtcggcggtgatccgccctcgcggcgtgtcgatcgtcactttgccgccaccctggcggatcgccgtcgccttggtcatttcgaagacttcagcgccggaagccgccgccgcccgcgccagcccgaccaggagcttcaacgggtggatgtggcctgtgccggtgtcgcgcacaccgcagaaatagcgcgtcgaccccagccgctcctgcgtttccgctctgtccatgaaggtggcgtgcgggtagccgtagcggctggcggcgatctccgcatttgcgcgaaagtccttctcgtagctcgccttgtgcgccacgttcatctggcccggcatgaaatcgatatcgatctggtgctcggtcgcaaaatcaagcagatgcttcttggcgtcctcggcaagatcgaacagcgccttcgagcgctcgaagccgatctcttcttccagttcctccggccacgagcgctggccggtgccgagctgcccgccgttgcggcccgacgcgccatcgccgaaccggcaggcctcgatgagcaccaccgacacgcccgccttggcgagatgataggccgcctgcagcccggtatagccgccgccgataatggcgacgtcgcatgtcttcgatccgtcaagttcaggataggtgggccgctcgcccactgtggcttgataccacgaaatgccgggcgcgatcgggctctgccatttctgctcggatgtcatgacgcgatcctcacacgttgagcaggaggaattcgcgttcccacgggctgatcacctgcatgaaggtctcgaactcgccgcgcttgaccccggcatagagcccgatgaactcgcggccgaacacctcctcgaaggccggctcgtcctccatcagggctacggcttccagcagtccgcgcggcaggtcgatcgagccttcgttggccgaatcctcggtcggcgctgtcggctcgatctccttcatgatcccgagcagaccgcaggcaagtgaagccgccagcgccagataggggttggcgtcggaactcggcagccggttctcgacgcgccgcgcctgcggatccgagacaggaacccggaacgccgtcgtgcggttgtcgtagccccatgcgttgttgacagggcacgacatgtcgggcgtcaggcggcggtaggagttgacgtatggggcgagcatgcagagcgcgctcggcacgtatttctgcatcccgccgatgaagtggaagaactccctggagggcgagccgtcggggttggagaatacgttcttgcccgtgtcctcgtggatgacggactggtggatgtgcatcgccgatccggcctggccctgcatcggcttggccatgaaggtggcgtagatgccgtgcttcatcgccgcctcgcggatcgtgcgcttgaacatgaagacctggtcggcaagctcgatcggattgccgtggcgcaggttgatctcgagctgcgccgggccttcctcgtggatcagcgtgtcgatctccagcccctgcttttcggagaagtggtagatgtcgtcgatcagttcgtcgaactcgttgatcccggcgatcgaatacccctgaccgcccagaatggcgcggcccgaacggcctttcggcggatgcagcggatagtcggggtcgtcgttcttggcaacgagatagaactcgatctcaggcgccaccaccggcttccagccgcggtcgtgatagagcttcagcacctgcttcagcacgttgcgcggcgtatagggcacttcctggccatcggcgctgacgacgtcgcagatcacctgcgcggtcgggtccgtctcccacggcacgacggacagcgtcgaaaggtcgggcaccagcttgagatcgctgtcgcgcggttcgtagcggaagctttctgtctcctcgggatattcgcccgaaatcgtgtgccggtagatcgcggacggcagcgccagcgatgtgttggaggtgaatttcgagctcggcatcatcttgccgcgcggcacgccggcgagatcgggcgtgatgcattcgatgtcttcgatcccgcgtgcccgcaagaactgcgctgcttccttccaggaggccacgccgcgaagatatccagggtccgggggagatttcttcgaggcgggaacgttcttggcaggtttcagcgtcgtcttttttggggacatgacacaccggtttacgttgatcttgcagccataataaccggagtttggcaattggcgaggggggacgcacgttgactttcgcctattgatggaaaaagaaggcgcctttcgacgaaggaaacggccgtgcagcgaagaagcgatgtaatcgtcataggcgcgggcgccgccggcatgatgtgcgccatccgcgccggccagcgcggccgctcggtggtcgtgctcgatcacgccaaggcgcccggcgacaagatccgcatttccggcggcggtcgctgcaacttcaccaatattcacgcctctccgaagaatttcctgtcggccaatccgcatttcatgaagtcggcgctcgcccgcttcacgccatcggacttcgtcgccatggtcgatcgccacaggatcgcctggcacgaaaagacgttggggcagctgttttgcgatgacagcgccaaggacatcatccgcatgctgctcgacgagatgcttgcggctggcgcgaggctcgagctgcgcaccgagatcgtcgctgtcgaaaagaccgaagacggctttcgcgtgtcgacctccgagggcgagtatctcgcaacgtcgctggtgatcgccaccggcggcaagtcgatcccgaaaatgggcgcgaccggtttcgcctatcgcatcgccgaacagttcggcctgcccatgatcgaaacccgtcccggcctcgtgccgctgacgctcgacccgcaactgctcgaaagcgtcgctccgctgtcgggcatcgcggcccccgccgaactcaggcatggcaagacggcgtttcgcgaggcgctgctcttcacccatcgcggcctgagcggcccggccatcctgcagatctcctcctactggcgcgagggcgacgagatcaccgtcgatatcgaaccggacgtcgatctcctcgcgcacctgaaggcggcaaagcaggcgaacggtcgccagtcggcgcagaccgcgctcggcgatgttctacccaagcgcctggcgcaatatctgaccgagcgcgccggcgtcaccggcaacatggccgacatgtccgacaaggtgctggcgcggctggtcgatgccgcgcagaactggacgatcaagccttcgggctccgagggctatcgcacggccgaagttacactcggtggcgtcgataccgcggcgctcgattcccgcagcatgcaggccaagtccgtacccggcctccatttcatcggcgaatgcgtcgacgtgaccggctggctcggcggctacaatttccagtgggcctgggcatcgggcgttgcggccggcgacagcctctgacgcctattcttcgtagaggtgaaaccagttgcaggattcaagagttcttaagcagggtgcgccatcctgtctcgatgacgtgcccggattgcttcctaaataaggctttacgagcacagtcttttgttggattgttgtgtcatagaagaagaagtgaggttctgcagatgaacaagaacacacgacgcgcccgcgccatcgcaattgccaaggcccagccggatacacggcttgtcgcaatccgctacgtcgtgctggccgccagcgccgccgccgccgtcatggcgctgctcctgccgcggatgctctaaggccctcctcgcaataggacgagaccttgccgtgcgccgatgcgcttgcatcttcaaacgcgcgcgaacgttatggcttgcggcaatatccagccatttaagcttatataaaaattaacgcatcttctgcaaagctctaaagtatgacttatgggcgcttcgcacttgcggagcgtgacaggcaatgattgccgtccgagcatgcgctcgcgattccccattgttccaaaatgttcgatgcactcagccgacgcgcgatgtcgccgccggtgggaggagtggtgtatggaaggccggaacccccatgtttattgacaggattctttcccgtttcaggatcaagaccaaggtccttatcttcgtcttgccgtttgttttaagtatttccgcagttggcttcaccggcctttacgcgtccggcctgcttcagggccgaatggagatctccaacagcgtccttcagtcgctgagcggcttcaaggatctcttcggttccatggacgactttctacgtgtgaccaatgaggaagcgcgcgacaagctctacgccgatgtcgccacccagcatgcgacgctgaacgccacgctgaagcagatcggcgacaatgccggccgcgccaatttgcaggccgcgaccgatggcacctccggtatctccgacaccgtcggcaagctctggaccctgcacgaacaggaagtcgccctgcgcaagtccatcgacgaagcccagaaggtgatgatctccagccgcttcaacgtcaattacgacgcccagcagctgcaggaaaatatccgcaacgacgaaggcaacgccaccgcgacgctgcgcgccgccgatcggctcctgaagggcggcgacgctctggccgccgtgatggccgatttcggcaaggcgcagctgccggccgacaagctcaaggtcgtcaccgacgcgctccccggcatcctgaaagcccagcgtctgatcgagatttccgttccgcagaaccagaagagcatgacgcagtcgctgtcgcagacgatcagcgacgtgaaggcgcaggcgaccgccgccgacgccggcaccgatgaggcaatcgccaatctcggacgtctggtctcgcgcttccgccagatgtcgacctacacccagctgacggcgacgcagatgatgcgtgccgccaccaccaccttcgtcgaactcgacagccgcatcgcccagaccaactccgtgctggaagatacgcgacgcctcgaaagcgcgatctattcgctgcagctggtgctcggcgaattcgccgccaagcccgacaaggacaaccgcgttcgcctgcagcaggaaatcgccacgctcggcaccaacctcaacacgttgctcgccagcgccaagggcatgaatttcgccgaggacatcgtcgcggcgatgtcgccggcgcttgcctccatggccaaggatgccgagagcctcgtcgccaccatcgaccagcgcgtcgccgactatgcctccgcccgccagcagctgaacgccgtctggggcgaactcaccgccttcgccgaactgcagaagcagaccgccggcgccgaacgcacccaggccaacggcatctccgttctcaccaccggtcttggcatcctgctgtccgtcgtcggcggcatcgcgctggtgctgaccctgcagcggccgatcggccagatcacgtcggccatgcgccgcatcgccgatggcgcgctcgacaccagcatcagcggcgagcagcgtcatgacgaaatcggcgacatggcccgcgcgctcggcatcttcaaggaaaacgccatctccaagatccgtatcgaggagcagagcgacgaggaacgcgccgcatccgagcacgagcgccagcgcaacgacgccgaaaagcgcgagatggaccgccagatcgaattcgccgtcaacgcgcttgcatctggtctcgagcgcatgtcgcagggcgacatctcgaccacgatcgacacgcccttcatcggccgtctcgaacggcttcgccaggatttcaacggctcgatgatgcgccttcaggcaaccatgagccagatccgcgacaacgtcgagatgatccagggcaacggcaaccagatggcccagtcggccgaggatctcgccaagcgtaccgaaaaccaggccgcctcgttggaagagactgccgccgccgtcgatcagatcaccgtcacggtgcgctcgtccgccgagcgtgcgaaggaggccgatcaggtcgtgcgccaggccaagcgcagcgccgatgactccgccaccgtcgtcagcaacgcgatcgacgcgatgggccgcatcgaggaagcctcgcaccagatcgagcagatcatcggcgtcatcgacgagatcgccttccagaccaaccttctggcgttgaatgccggcatcgaggccgcgcgcgccggtgaagccggcaagggcttcgccgtggtcgccatggaagtccgcgaactggcgcagcgctccgccgccgccgcccaggagatcaaggggctgatcaacaagtcgaccaacgaggtgaactccggttcgcagttcgtgcagcagaccggcacggtcctggcgaagatcagcacccagatcgtcgccatcagcgagcatgtcgaagtcatcgcccgcgccagccacgatcagtccggcgcgctgcaggaggtcaacacgaccgtcaaccagatggaccagatgacgcagcagaacgccgcgatggtcgaggagaccacggccgccagccgtgagcttgccaacgaggccgacgccctgctccagctcgtcaggcagttcaagatcgatagcggcagccaggagcgggtctaccgcgccgcctgatcgcgaccggcatattcgaaaacatgcgatggctccggaaacggggccatttgcatgtcgttcagtgtgcggtgcaggaaattacccgtgcattcttgctgcttgaaacatgatattcgtcagtttcgctgcaatttatcttaaaactttccgattaatttcggcccggattatacgtcaggggtctttctatgcttcatttcttctcagcttctattgtccggcaaatcgtcgcgattacgattgctcttcttgtcttcagcacggtttcgattgtttctgtgacatactacaatcttagcgcgtatgtcatgaccagcgcggtcaccgacgccaaggacgccagccgcgccatggcggtactctacgcggccggcgatccggcggcgaaggtcgatgttcgcgacaacaagctcgtcgccgtcagcgaagagaagctgccatcgtcgctcggcgaccacgcccttgtcgatcgcaccgccgcctccgtcgccggctacgccacggtgttcgaacgccagggcggcgactatgtacgcatctcgacgaacgtgaagaaggaaaacggcgagcgcgccgttggcaccaagcttgctgccgatcatccggcgcaggcggctcttgccaagggtgaagcctattacggccaggccgatctcttcggccagaagttcatgaccggctatttcccggtcaagagcagcgcgggctccacggtcggcgtcctcttcatcggcatcccgatggaggtctactacagcagcctgcagcagctcctgaccctggtggtcggcgttggtctcgccgtcctcctgatcgtcggcatcatcgcctatgtcgcgatccgcgccacgatccgcccgctcgagaccctgacaggcgccatcaacacgatctcctcgggcaatctcgacacgaagattccctgcaccgacaaggagaacgagttcggcgcgatcggcaaggcgctggccctgttccaggatggcgctcgcgcccggctcacgctggaaacgcaggcggccgagcagcgcgccctgagcgacgaggaacgcagccgcaacgacgccgaaaagcgcacgctcgacgatcagatccagtttgccgtcagtgaactcgctgccggcctcggccgcctgtcgcgtggcgacgtctcggaaatgatcagcaccccgttcgtcggccggctcgagcagctgcgggtggatttcaacgcctcgctcgaacgcctgcaggatacgctctcgcgcatccgcgacaacgcggcgaccatccaccgcaattccggctccatgctctcatcggctgacgagctttccaagcgcaccgaggcgcaggccgccagcctggaggaaaccgccgcagccgtcgaggaaatcaccgtcaccgtccgctcgtcggccgaacgcgcccgcgaggcaaacagcgccgtcatcgtcaccaagaagacggcggacagctcgagtgtcgtggtcggcgataccgtcgccgccatggaccgcatcgaagcagcctccaagcagatcgagcagatcatcgaggtaatcgacgacatcgccttccagaccaacctgctggcgttgaacgcgggcatcgaggcggcacgtgccggtgaggccggcaagggctttgccgtcgtcgccatggaagttcgcgaactcgctcagcgctcggccgatgccgcgcgtgagatcaagagcctgatcgagacctcgaccagggaagttgcggctggctccggtctcgtccagaagacaggggcggttctcgcctcgatcagcagcgagatcatcgcgatcagcaagcacgtcgaaaccatcgccaccgccagcgccgaccagtcggcggccctgcaggaagtcaacagctccgtcaacgcgatggatcagatgacgcagaagaacgcggcgatggttgaagatacgaccggccagagccgccagctggcaagcgaagccgacgcgctcatgtcgctgatccagcagttccgcatcgatgcgtcgtcggccccgggccaggtccgcatgcgcgacgccgcctgatcgccttgccgtcaggtttcatcatcgaagggtcgcccgtcgtgcggccctttttcgttcggagtagctgtggcgccgtgttgcaggatcggatttgagggctcagctccggcccgcgacgatgaccgggatcaacagatccccccagttgccatcgccgccgtgatggcgggccgatcggacgatctcgaccgaaacgccggcatcgaccgccttcatgaccgactggttcagccgatgcaggtcgttggcgagcatgcggatcatgccttgctgatccggcgtcatgctggtggattgttcctctgcgcgttccttgacgcgtgcaagcgtaggcatggtcttctcctccttcggttgacgttactcggctgctggcttgaactgtgcgtgttcggtggattcccgcatcgcggtggtcgaggaccggccgcctgatattgccatcgacacggcgtcgaaatagccggtgccgacttcgcgctggtgcttggtcgccgtgtagccgtttacttcggccgcgaattccgcctgctgcagctccgaataggcggccatctgccggtccctgtagccacgagcgagctcatacatgccgaagttcagctggtggaagcctgccagcgtgatgaactggaacttgtagcccatggctccaagctcgcgctgaaacctggcgatcgtcgcgtcgtcgaggttctttttccagttgaacgacggcgagcagttgtaggcgagcaatttgcccggatgcaccttgtgcacgccctcggcgaaccgccttgcctgctccagatccggcttcgaggtctcgcaccagatcagatcgcaatgcggtgcgtaggcgacggcacgcgcgatgcagggctccagcccgttgcgcacctgatggaagccctcgaccgtgcgaccggcctcgtagtcgacgaagggcttgtcgcgctcgtcgatatcggaggtcaacagcttggcggcttccgcgtcggtgcgggcgatgacgagcgtcggcacccccatgacgtcggcggcaaggcgtgcggcgtcgagattgcggatatgggcggcggtcgggatcagaaccttgccgccgagatggccgcacttcttttccgacgccagctggtcctcgaaatggacccccgcggcaccggcctcgatataggccttcatgatctcgaaggcgttcagcggcccgccgaacccggcttccgcatcggcgacaataggcgcgaaccatgtctcgaccgagagccccttgtcttccgaggtctcgatctggtcggcgcgctgcagcgttttgttgatccgctttgcaagctccggcccggcattggcggggtagagcgattgatcgggatacatcgccgacgccgtgttggcatcggccgcgacctgccaccccgagagatagatcgccttcagcccggcgcggaccatctgcatggcctggttgccggaaagcgcgccgagcgcgttcacgaagtcgtcctggtgcagcagctgccagaggcggttggcgcccatttcggccagcgagtaacgaagctcgaccgatccgcgcagccgtctcacatcatcggccgaataaggacgttcgatgccggcgaagcggttggcgggaatattccggtggagcttgtcaaaatctgtcatgtcttcctccctgcataacatcatggccggtctggctgattgacaggatttacaagccagcaggaaatggccagagttatctggagaagtgcgatgaaatagaggtcgtcatgcaaagaacgtgacaagtttcggcagtaaatttgtcaagttttgtaaattctgcgacccggatattctgtaagggtttgtcacatggctgagcgcaagatgtttgccggtcccagggtccgccgtatccgaaacggcctcggcgtcacgcaggcggcgatggccgcggagctggagatctcgccgtcctatctcaacctgatcgagcgcaaccagcgcccgctgacggtgcagctgctcctgaagctcgcggcggtctacaaggtcgatctggaggagctgcgcgccgaaagcggcggcagccttggtcagttgaaggaagtcttcgccgatccgctgttatccggcgagttgccgggcgatcaggaactggtcgaggtcgcggaagcagcacccaatgcggcaagtggcgtcatcaagctctaccgcgcctacaaggagcaggcggcgcgtctctccgatctcacgcttctgagtgcaggggaggggcaggtgccgctgtcgggcgcgcggctgccggccgatgaggtgcgcgatgtgctggaacgccgctcggcctatttcccgcgcatcgagacggcggccgaggcgttcctgcatgcgctcgccgatccccgcgatatcatctcgacgttcaaggagtggctgcgcgccgagcgtggcatcggcgttcgcgttctgcccatccacgtcatgccggatctgcgccgccgtttcgatcgtcactccatgcggctgttcatttccgagcgcctgtcgccggccgatcaggcgcaggagatcgccatcgaagtcgcgacgctggcgctacgcgaggcgatcctgagcgagctcgaaggcctgatgctgtccaccgaggaggcgaggcgcatcgcccgcttcgagctcgcgcgctatgcggcactggcgctgaccatgccctacgcgcccttcctcgccgctgcccaggcggcttcctacgatatcgatatcctgcgcgtccgcttcaacgtctccttcgcgcaggccgcaacccggttgacgatgctgcagcgccctggcgcctcggcggtctccttcttcaccatggaaatcgacggtgccggccatcggctgcggcgggcgggagcgcatggtttcccgcatcggcgcttcggcggcgactgtccgaagctcaacgttcatgtcgcgctcctccagcccgggcagatcctggccgagacggtcgagatgccggacggtacccgctatctcaccatatcgcgaacgctggagggaccgaacgccccgttcggggagcgcgtccgccgcaccgcgcttctcgtcggttgtgatgcctcggccggtgagggaacggtctacggtcaggcggtctccacgcaaaaggcgatcacggcgggctccggctgtcgtctttgcgaaaggcgcggctgtctctcgcgcgccgagccgcccgtcacgaggccgctggggctcgatgagatggtctcgggcctcagcagcttcgacgtctagctactgtgtctcgtcagggcgaaatcattgagagtgcaggattttgcgcttgtcggcttcggaaatcctttctagtctgcaaccaaaaccagagggagggcagccgcggaaaacgatgcccaaacaaaaaagcaggagatagcatgaggtcaattctcgttaagctcgcggccacagctctcgtggcggggctttcggtcacgccgtccgttgccgatgatcgcgtcgtcaacgtctacaactggtccgattacatcgacagttccatcctcgaggatttcaccaaggaaaccggcatcaaggtggtctacgacaccttcgacagcaacgagacgctggaagccaagcttctggccggcggcacgggctacgacgtcgtggtgccgaccgtctccttcatgcagcgccagatcgccgccggtgtctatcagaagctcgacaagtcgaagctgccgaacctcgtcaacatgtgggacgtggtgatgaagggcgtcgcttccttcgatccgggcaatgagtacagcgtcgattacatgtggggcaccacgggtatcggctacaatgtcgacaaggttaaggccgcgctcggcaccgatgagaagcccaactgggatgcgctcttcgatcccgccaaggccgccaagctcaaggactgcggcatctacatgctggactctccgaccgacgtcatcccctccgtgctcgcctatctcggcctcgatccgaacagcacgaagaccgaagacctgaagaaggcgcaggaagtgctgctgtccgttcgcccctacgtgcgcaagttccactcgtcggaatacatcagcgcgcttgccaatggcgacatctgcatcgctctcggcttctccggcgacgtcttccaggcccgcgaccgcgccaccgaagccaatgccggcgtcaaggtcgattactcggtgccgaaccagggcgcgcagatcttcttcgacgtcttcggtatcccgaaggatgcgcagcatgtcgaggaagcgcacgctttcatcaactacatgatgaagcccgaggttgccgccaaggcatcgaactacgtcttctacgccaacggcaacaaggcctcgcagccgctcctggacaaggcagtgatcgacgacacggcgatctatccgacgcccgaggtcatggcgaagctcttcaccgtcccgccgctcgatgcgaaagcgcagcgtgccgtgacgcgactgtggacgacagtcgtcaccggtcagtaatgcactgatctgcccgaaccatcaggttcgggcatttcttttcgtggcgcatcggatcaggtcagttttcggggaaaaatcatgaagtcactcggcaatattcgccgttcctttgcgccttgggccgatccggccgccaagccgttcatctcggtcaagaacgtcaccaagcgcttcggtgatttcaccgccgtcgacgacctgtcgcttaatatctaccaccgtgagttcttcgcgctgctcggcgcttccggctgcggcaagtccacgctgctgcgcatgctggccggtttcgagcagccgacatcgggcgagatcatcctcgacggcacggatctcgccggaaccccgccctacaagcggcccgtcaacatgatgttccagtcctacgcgctcttcccgcacatgacggtcgaaaagaacatcgccttcggcctgcgccaggatggcatggccaaggacgagatcggcgagcgcgtgctgcagatgctgaagatggtgaagctggagaaattcgcctcccgcaagccgaaccagctttccggcggccagcgccagcgcgtggcgctcgcccgctcgctggccaagcgcccgaaggtgcttctcctcgacgaaccgcttggcgcgctcgacaagaagctgcgcgaggaaacccagttcgagctgatggacctgcagcagaacctcggcctcaccttcgtcgtcgtcacccacgaccaggaggaggcgatgaccatggccgaccgtatcgcggtcatgagccacggcaaggtcgtccaggtggcgacgccggccgagatctacgaggcgcccaactgccgcttcgtggccgatttcatcggcgacgtgaacattttcgacggcaaggtcacgacctccgatgccaacggcgtcgagatatcggtcgacgaggacctgaccatcaggctgtcgggcgccgagcccctggtcgtcgacagcaccgccgggttcgccatccgccccgaaaagctgagggtcagccgcacgccgccggccaatccccgcatcaacgccgcctcgggcgagctctgggacatcggctatctcggcgacatgaccgtcttccatgtgaagctgaaaagcggcaaggtcgtcaaggcgtcgtcgctgaacgcacagcgcgctgtcgatgatcccttcgtctacgatcaggaagtctgggtcaccttcgccgaggacgccggcgttctgttgaaggattgatgccatgggcaagctcggatcatcggtctacaaccgcctcgtcatcatcattccgtacgtctggctgctgctgttctttctggcgccgttcttcatcgttttccgcatttcgctgtcgacgacggcgatcgccatgccaccctatgatccggccttctcattctccgacagctgggcggacgtatgggacaagatcgccagcttctccttcgataattacagctacctgatcgacgacccgctctatttcaacgcctatgtctccagcgtcaccatcgccgggatctcgacgctgctgacgctgctgatcgcctatccgatcgcctacggcatggcgaatgcgccgcgcagcatccggccgacgctgctgatgctggtcatcctgccgttctggactagcttcctgatccgcgtctacgcctggatcgccatcctgaaaccggaagggctgctgaaccagctgctgatctcgctgaacatcatcgacagtccgctgatcatcctcaataccaacatcgcggtctatatcggcatcgtctattcctatctgcccttcatggtgctgccgctctattcctcgctggagaagatggacggcacgctgatcgaggcggcgcaggatctcggctgcccgcccatatcggcgttctggcgcgtcactttcccgctgtcgctgccgggtgtcgtcgccggctgcatgctggtcttcattcccgccgtcggcgagttcgtcatccccgatctgctcggcggatcgcagacgctgatgatcggcaagacgctgtggaacgagttcaattccaaccgcgactggccggtatcctcggccgtggccaccatcctgctcctcattctggtgatccccatcgtgttcttccagaatgtacaggccaaggccgacgagcaggggagataggccatgatgaaatggacccgcttcaacgtcgtctcggtcgttctcggcttcgccttcctctatctgccgatcgtgctgctcgtcatcttctcgttcaacgaatccaagctcgtcaccgtgtggggcggcttctcgaccaagtggtacgtctcgctcttcaataaccaggcgctgctcgatgccgcctgggtgacgctcagggtcggcgttctctcggccaccgccgcgaccgtcctgggcacgctcgccgccatcacgctggtgcgctacacccgctttcgtggccgcatgctgttttccggcatggtctacgcgccgctcgtcatgcccgaggtcatcaccggcctgtcgctgctgctgctcttcgtggcgattggtttcgaccgcggcttctggaccatcgcgctggcgcatacgacgctcaccatgtgcttcgtcgccgtcgtcgtgcagtcgcgcctgctgagcttcgaccggtcgatcgaggaagcggcgcttgatctcggctcgccgccggtccgcaccttcttcgagatcacgctgccgatcatagcgcccgccgtagcatcgggctggattctcgccttcaccctgtcgctcgacgatctcgtcatcgcgagcttcacgtcgggaccgggcgccaccacgctgccgatgaaaatctacagccaggtgcgtctcggcgttacgcccgagatcaacgcggtctgcaccatcctgatcggcatcgtcgcggtcggtgtcatctgcgcatccgtcatcaccaagcggcgcgaagtgcagcgcgaacgggatgagcgggcagcggcgaacgcgccgtgattatttggtggcgccctgctgctgctgcttttgttggttgcccggcagtgccgaaagaaccggatcgggccaggaaccaccgacgaagaacggcagggccggaaaggccgcatcgttggcggggtcggtcgcggcgatcttgccggagagcgcgagcccgcccgatttgtagggaatgacgcccgacagcgtgatcgtttccttcggcccttcgatcaggccgcgccggatttgcgccgccccatcatcgagatcggcctcgatgtcgaagcgatcgaacgcgaaggcccgatgcgagacggcattcagcgagaagaaatccgccttcgccgcttcgctgcgcaccgcatcggaatcgaacccgggcaacgagcccgcctgtgcgcggaaacggatattgccggtcacgtcggccggccccgctttccagataggcagcgcggtgctgactgcgagatcgagcgaacctgttgtcagcggcaacggaccctgcaggttcaggcgttcgataaggccggcgaaatccgcgccccggatcgacatctgcagcttgccgccaccgtcgaagtcaccgcgcttggccgcgatataggcggtcagcgccccgccttcgaactggctgtcgccgatgtcgaaccgtgcttcgttgctggagacgataatactggcgccgacgttggagagcttgaagggcacgagatcggcttgcctggcggaaagccgcaggtcgatgtcgagagcctgcaacgctccgccctcgggcgcgccacggtcctcgccggcggcaagccggaccacaaacgcgtcgaacagggatttgaagttgatctggtcgaaggccagcgtaccgccgagcttggggcgcttgccaggcataaagctcacatccatcgcgccacgggcgcttgaaccattcatgcccaggctgacattgtcgaaacggaagccatttgccgccgagatcacgtcgctatcgatcgaaaacgccttcagcgtcgcggcatccggcagcgctcgcccggcccatgtcagcaatgccggaaggtccggaatgccgagagacatgctgccctgcaggttgaacagccgagcgatgttcgccacgccatcgaacttggctgttaccagcgtcgaggtcagcgcggccttcagcggcgcgttcttgccaccgaacgccagcagcgggctgcgcgaggaaaagtccagcttgatgtcgaggccgttcattctggcgatcagaaccgcggtgagcgggctcgacaggcgcggccagccgatatcggcggtgacgctgtcgaagcggtaggtcttgccgctggcgacatcggccacgtcaagggtgccatcctcgacagtgatcgttccgatgtcggcgtcgagcgccgcgtcgagcgtttcctcgccgttctgctcccttgcgccgatgattgcctgggccagttggccttcatccgtccagtcgatggtgccatcgcgctcgcgcgtcaaaagcaggttgggccgcagtatattgaaatcgtggaagctcgccttgcccctgaaggcatcgatcaggctgaactccgccgagatgctttcgatcgtgccgaaaagcttgttgtcgccatccttctggcgaacggtgatcttgttgatggtgatgcgcggtgtcggccagaactcgatcaccgggcgcccggaaatctcggcgctgtagcccgtccatcgcgacagcgaatcctccatgccggagcgcaccagaccggtcgagatcacataaggtcccgccacgcgcagagaaacgaagacggcgaggaagaccagcagcgagatcgtcgcgacgcgggcgacacccggcagccagcggttgacgggcctgatttttatccgccatggcggtggtcgggacgtacccatgcgtttcgccagtctttcgacgtctgcccgttaatgtactgaaattccggatatatcaaatgccgggcggttgcaaatatatagccgggcggcccggctggccgccacctttatccgtcttcatggcgtgttatataggttggtaacaagaggagttctgcatgcgtgacgataagccactctggatcccttcgcgagcctcggtcgaagccagccccatcttcgcgttcatgcagaagtgcaaccgggactttggtctttccctgtccagttatggcgagttgcatgcatggtcggtcgccgatcgcggcggattctggacggcggtctgggagttttgcgctgtcaagggagagcgcggcgagcgcgtgcttgtcgacgacgcggtcatgctcgacgcccgcttctttcccgacgcgacgctgaacttcgccgaaaacctgctctcgggcgagggagccggggatggaacagctgaggcgatcatctttcgcggagaggacaaggcgcaggaccgctggagctgggacaggctgcgtgcgctggtttcgaggctgcagcaggcaatgcgcgccgacggcataggcccgggcgatcgcgtggcggcgatgatgccgaacatgcccgagacggtggccttcatgctcgccgccgcctcgatcggcgcgatctggtcgtcctgctctcccgatttcggcgagcagggcgtgcttgatcgtttcggccagatcgagccgaagcttttcgtcacctgcgatgcctactggtacggcggcaagctgcaggacatcagggagaaggtggccgcggtcgcagccaagctcggcgttcccaccgtcgtcgtgcactatgccggcgatgcggaggatgtcgccagcgccgtatcgggcgctcgaacgctggacgccttcgtcgagggccataccgcccgcccggtcgaatttacccgccttccgttctcgcatccgctctacatcctgttttcctcgggcaccaccggcgttcccaagtgcatcgtgcactcggccggcggcacgctgctgcagcacctcaaggagcatcgtctgcactgcggtcttggcgccggcgagaagctcttctatttcaccacctgcggctggatgatgtggaactggctggtatccgggcttgcggtcggcgccacgctctgcctgttcgacggctcccccttcgcgcccgatggcaacgtgctcttcgattacgcgcaggcagaacggttcgcggtcttcggcacctcggcgaaatatatcgatgccgtgcgcaagagcggcctgacgccgcgcagttcacatgatctcgccagcctgcgtctgatgacctcgaccggatcgccgctgtcacccgaaggcttcaccttcgtgtatgagggcatcaaggaagacattcagcttgcctccatctccggcggcaccgacatcgtctcctgcttcgtgctgggcaatcccatgcagccggtctggcgcggcgaaatccaggggccggggctcggccttgccatggacgtatgggacgacgacggccatccggtgcgcggcgaaaagggcgagctggtctgcaccaaggcattcccgtcgatgccggtcatgttctggaacgacagcgatggcgccaaatatcgcgcggcctatttcgagcgcttcgacaatatctggtgccacggcgatttcgccgaatggacggagcatgacggcatcatcatccacggccgctcggacgcgacgctcaatccgggtggtgtgcgtatcggcaccgcggagatctacaatcaggtcgagcagatgcccgaggtcgccgaagcgctctgcatcggccaggactgggatgacgatgtcagggtcgttctcttcgttcgtctggcatccggcgtgacgctgaccgatgagctggtcaagtcaatcaaagcgcgagtccgcagcggcgcgtcgccacgccacgtccccgccaagatcatcgcggttgctgatattccgcgcaccaagtccggaaagatcgtcgagctcgccgttcgcgagatcgtgcacggccggcccgtgaagaacaaggaagcactcgcaaatccggaagctcttgatttgttttctaaaatagaagagctgcgcgtctgattcattaaaatgatagcgaaactacaatatatgaccgtgcagagcttcgtggctccggcaacctttcgttaagaaagccttgtcaaaggtaaatgtaacttggggctgcatatgaacgaggcagcttggagccttcgctcccgcaacatgatgttagaccgcctaagcccttgttgaacagcacccaaatttcaggcagccctttggctgccttttttcttagcttgccagaacccgctgcgacggaaacgcgatctcgacgagcgtcccttcattgggtgtcgagctgatcgcgaagatcgccctgttggcatcgaccatggccttggtgagcggcaggccgaggcccgtgccttctccgcgatggcgcgattgcgtcgagacctgccggaaaggcttcatcgcctggtcgagttcgctgcgggtcatccccacgccggtgtcgcgaatgcgaagcacgacgctgccattcgcctcgtaggaggtcgacacgacgatctgcccgcccgatggcgtgaaacggatggcgttggacaggatgttgagcgcgatctgcttgatcgagcgcagatcggcgaccacatcgggaacggcatgcgaaagcgcagtgcggatgatcacccgctggctgtttgcctgcggctgcagcagcgccacggcttccgagatcgcttcgttgagattgatcgcgtcgaaatcgagatccatctctcccgcttcgatcttggaaatatcgagcaggtcgttgacgatatcgagcacatgccggccggagcggccgatgtcgttggcatattcgacgtagcgcgggtggccgatcggcccgaaccgctcgccggccatcatgtcggagaagccgatgatggcattgagcggcgtgcggatctcgtggctgacgcgggcaaggaaatcggtcttgtgggcgttggccgtctcggcggcactcttggcgccgcgcaattcgtcctcggtgcgcttccactgggtgatgtcgcggatcacggcgcagtagccgctggaggaggtcaggcgtccgagcgtcatgaacagcggtacgaagccgcccgatgcctcgcggccgatcacctcgcgtccgtcattgaggacgctcgcgactccatggctggaaatgccgttgatatagtcgagcacggccttctggctctcatgcgcgaacagcatcacgaaaggtttgccgcgcgtatcgtcctcgtcgtagttgaagagcgcgctggcggatcggttcatcgaccggatgtcgccatcggcgccgatcaccacgacgccatcggtcgcggtctcgaggatcgagcgcagttcctcgacttccacctgcagcttggcgaccttttcgatcatgcggtcggcagcgcgcccgtctgcgggcggagcgacgtccggggcaggcgccggccgctcgctgacgacaggcatcagcgccagcatcaatgccgtgctgtcttcccagcggatcgactgcagccgtgccgacaccggcacgaggtcgtcatccatggtgacgagcatcatgccgtcatgacgcgcgctggcgtcggcgatgtcgtcgcgctggagcagcgcatcgataccaccgacatcggccagatcctgcagcgaattgtagcccgtcaggcgcatgaactcggggttggcatggatgagctggtccccggcatgaatgagcacggcgaccggcagctgatcgatcatcccggccgagaagccatcggtcatcttcacccggggcggaatgaagctcgccaggatatccatctggctgacggtctcttcgagaccttcggtcacgtcgtcgctgtcgtcgttcgccgtatccggcgttttgctgagcggttcgtccggcgactgctcggaagaggaggggacctcggcgtcactgagtacagcgtcgttgtctgcggtgtcgctggctacctgctgctcagcctcatccgattcagagacctcggcgctgtcctcgtgctgatccgtcgtctcggcaacgacctcatcgccttgcgatgcgttgtcattgataaggtccgttcgaggtgcctcgtcgatcgccttctgcgcctcgtcagccgctggcttcgtctcgccatcctcgttcgacgtattcacgccaaaagcctcaagacgcttggcgatctcgcggaaattcgcctgctcggcgtttgtcaggccggggccgacgccatgcagctgaacgatcttgtcggtcagtcggccgttcggcgtttcgacgatgcgcaaaaccggcggttcggcgcgcggtgtttccacgctctgcgttggcgccggagcaggcgtatcgtcttcggtggaatgctcttcctcgtcagcgagcgagtccatgcccgcatcggcagcgtccgtcgtcgccacggaagcgggcgctgcgtcgatatcgtcctcggcaagcgtctcttccgcgagctcatccgccacggtctcgtcgttcagctgatcgagcgcgtcgtcataagcaatgccatcagggccgaatgtcaggccgagcgccagcggatcttccgctgcgtcggagaggcgcacgacgccgaagccacggaagccatcgaattcgcggctgcgcgtataggtcggcagtgccgccaggtcgaccggcacggcgaggctcgttccctcgatcggccaatgaatggtcttgcccgaccatgtgtcgcggcgcgccagcgcctcggaaatcttgccctcgggatcgagattgaacagcgccgacacatcgctgaaggcgatgccgacaatgtccgccgcatgcgggccgacagcctccgcgaactcgctggagacctcgctgaaatgcccctcggcgtcgatcttccagacaaaacgggtcgcccggctgttcggcttgaagacgaagcggccgttctcggccccttgcaggacgtcggaaattgcctccgctccggccgctaccacttccgcctcatcatcaggaccgacggcatcggtctccggatcggctatgtcggcctgtgctggatcggccaccgcctcgtcgtcggcgagctcgatagcctcaggaggctgttcggcttgcgcgttcacatcatcgggctcgaaagccgcgatgtcgtcatcggcaaccgtctcgcccggatggaacgcctcgtccggctcgccatcatcggccgccattgcctcctcgacaatcaaagactcctcgatgtcgtcggaggcgttgtcctcggcaatcaatgtttcgggctcgggatcggaatccgcgaggttctctgcatcgctgaacccggccgtttcctcgcccatgccaggccccacgccggcccccatgctaggccccaagtcaggctcgatcgcgccggcctcgaacgcttcttcatcggccggcaccgtctccgcctcgaaagcctctgccgcaaccgccgaagcctcactgacgtcggtatcctcagcaatgctctcgtccggcgcgtcctcgatatcctcgatatcggcgacggcgtcgatcgcatcggcgaatgtcgcggcaggggcggcgatatggttaacggggcttgtggataagtcgggggcatcggtcgggtcgagacgcccgagcacggtctccaccgcgaagagcaggtaaagcgccggctcgacactgattcgcccgacggcggcaggcaggtaacccttgcctgtggcgaccggtcgcttgatcagtccatgcggatgcgcgccggccatcgtcgccagcgccttggcggtgggctgcgtcacgccgagcgaaggaaagccgggggaggcggcaacgatctcgccttcgccgccaatcacggccatatgcgtatccggatcgtcgagccccttcagcatctgcgcggccgattgctccgtcgacagcgcgcgggtcgcgaccggcagcgacacgagcaccgccgcttcgcccgaaacgtcaatcagttcaacggctgcctgcacggcgacgcgctggaagccctgcgcgatgcggatcatgaaattcctgctatcgccgatccgtgaaagctgtcgggcggtgacttccagctggcggtaggtgatgtcgccgcgattgacgccctgatcgaggagatcatagacggccggatggccgaaaagctcggcgcccgagccgtttgcccagagcgcgcgcgaaaggtccgccgagaaaagcaccagcgcttcgccacgggcaaagtgctcacgcactcgcggatgcacggcgatgtcgatgaacggatactggactgcgggcatcagcggacctttagtcttcgggcctggcaaattaacggtctattaataacgacaggtcgcaaaccggtccagcgcgaccaatggctttcggccgaaaaggttaacgtcggttgcgtcgcacaatcatgttgcactgcacaataaaatgcgctatatgatgtccatctaacaaacgaggctttcacgatgccgagacccaaggagcaagcaccaatggcgaaaatggaagacgtattttctatctcctcttttgaccccgcgaagttcgctgactcgtttcgcgatttcgccgaaaagggttcgcagcagtcgcgcgaagcctatgccaagatgaaggccgccggcgaagaagccggcaagacgcttgaatccaccgtccagacggcccaggccggtgccgccgagatcggccatcaggccatcggcgcgctgcgcaccaacgctgagaactcgctgagccacatggacgcgcttctctcggtcaagtccgtcgccgaattcttcgagctgcagacctccttcctgcgcaagcaggcggaactgacgatcgagcaggcaaaggccatgcaggaaacctccaagaaggttgccgaaaatgttgccaagccgtcgaaggaagcggccgaaaaggtcatggcctccttcaaggccgcctgatttttgtcaccgacaaacgaaaaggctggaccctttgtccggcctttttgtatattaaggacagatagggcttgaattaaatttcaagtccccgtatgtgagccccgtcgcgccaagcgacgtttgtgcggttgtagctcagttggttagagcgcaggtttgtggcacctgaggtcggaggttcgagaccccccaaccgtaccattccccaccatgacaagattaggaagccggcctgggtctctgtcgagacgtggcctcaatgcttcatcatcacgggcatggtcgcgtgcgaaagcacgtagcgggtgatccggccgaagagcagttccagaacatagccgtgtctgaaggcaccgatgagcaggcaggtggctttctccgtccgggcgaagtcgacgatcgctttgccgatcgaaccgccgcccgaggctatagcgaccacctgtcctttcagcgcaaggcgcgcaagcagcgcttcggcgctgaccttggccttgccgtctgtatcatcgacgcagagcacggtgatccgcgcggcggccgacagccagcgcctggcggcgaccagcgtgtcttcggcgtgtccgtgctgtctccaaccgatcaccacatggccgaaaagattgccctggtagtaatctcgcgtgggcggcatcagcaccagcttgtgctggctgaacacaacgctgcgaaaggcgtcctgcgcgtcggcgttcccatggctcgatgtcaccacgagctcgcttgcaacgcattcggtcgcgacgcagcgggcgacatcgccgcggcaatcgtcgagaaagaccgtgcgtcgttgcgggtcgcgccggcgccaggtcacgaatgcctggttcacctgctcgaaacgctgccgggacgagccctcggcgtggtcgcgcaactgtatcagatcgatctcctcggcggaaaagaccagcgtcatcggttccgatccgatgtgggccgcggccatgcagccatggatggcatgcgccgcgtcctcggcaaggtcgaggcagagccgggcggtcatcgggtccggcagcagcgccagaacctccgcgccgccatgcgatcggcacagcggactgtaactttcgagatcctgatcggcttcttttcgatcgcttgtgaacatggccgtacgcgctccaaagggcgctgccgggcaaacaatgaccgcatcggggcggccgcaccgcaggcgccaacgacgtgattttacgcctgcggatgacgctctgcaacaaactccgcagcgagaaaatcgcatggtccggcgaaacgccgcgttccccaaatggcgcccgcaaacacccgccaatccccgcacgcacagcggaccggcattttttcgcggctggcccttgtataaaaggccttgctaatcaatatcatcgcgatgctcggagccccccgtgtcatattgcgttgcaaaatgtgattgagaatgccattttcccgccgggggttaattcagagtgattttagaaggagacttatatgtccatttcgctcagcaatctggataaatccaacgcccagccaatccctccggtcaacgcagccgcggttctgagaacggcacgcgagaccattggctacagcgttgatgatctcgccgtgacgtgtggtttgctcgtcgcggaaatcgaggaagtcgagagcggcgaagatacggattcggccaagatcaagcggatcgccgcagccttgcagctgccgctgacctcgctcggcctcgaataatccagttgtcttgcgggactggcggcatgtcgccggtcccgccgacttaacggttccttaaccgtgttgcccgaaccgcagggacgggccgatgccagaggtagttttacctctccccatataggatatattggcaacctgagggcgaatgttgagccgggcgctacatcgtgttgagcggcagccggacgatatcgtggggatggcatcatggaacgacgtgcatttcgcatcggcgatcgattggtcgatggcggggaattcctggaacgcggcatgctgctcgcgtgcgcggctctggccgtcgtgctccccattctcggcaccagtctttccgatacgaccgacgatatccgcttgcatgatgcccgcctgttcggcgcggctacctatcttctgcttttggcctataccgccggtttcttcggcgtcttcacgcgttccgtgcgcgagcatatgcgcttcatcgatctcggcggcctgatcatgaccgccgttgccatctcgcgcgccgtctacatgcttggctgggttccgcttgccggtgccgtggataacggcggccttgcgacggcgccgctggccggatttcacctgtcctacggcagcgtgccgctcttcgttctgctgttcggcggcacatggcagttgcgccggtcctggcggacctgatcgcccgacaataccgatcctttcccgctgatcgtggaactccggccatcggcacacgttttccttgtctgagaggagcgcgtgcatgttggaacccccgtctattcttcagacagaaggcgcagcgaagggccgtgaggacggtcgcgacaggcccgttatcgcgagccttggccaattccgctggaacagccgcgtcgtcgtgatctttcccgacaaggacaattcccgaaccgcccggcaggaaaaccagctgatggcggcccgcccgggcctgcaggagcgcgacgtggtcgtcttgaaggtcagtggcgagagcgtgcgcccgcttctcggtgccgcggaggatatgaaggagcaagcgcttgccggtgaactggcccgggatctcgccgccccgccaccgggagaattcatggccttccttgtcggcaaggatgggacggtgaagctcacgattggccagccgatcacggccgccgagcttttcgccatcatcgatgccatgccgatgcgcgcgggcgaaaccgctcgaaactagcgccggccaccctgacccacacatgcatgaaaggagcggatcatgtccgtgccaaacgaacccttgcccggcacgccgccgatgccgggacccgattgggcgccgcaccccccgatccacgaaccggagcccgacgccctacccgacgagctgcccaaccccaatccggatgaaaacgacgagcccgcgaagcacgcgtgagcctggcaacgccccgcgaaagcaggccgggagcaaggcgtgcggggcgcaagctacaggaacatccgccggtcgtccgacaccagctcctgcaggaagtcgaccacggtgcgcacgcgcaggagatcgcgtgcgctttcgtgatacgtcgtccagtaggcgcgctcgatcgagacatccggcaggatgcggatcaactcgggatattgccgggcgatgtaatcgtgcaggatgccgatgccggcaccggagcgaacggcctccgtctggccggtcgcggtcgaaatctcgaagccggcatcccagctgcgcatcaccgccgacgagaagttcagcgatgcggtgaaaaccagatcctcgacatagccgatgcgggggtgttccttgagcgcctcgacatcatcgggggcgccgttcgcttgaagatagtccctcgaggcgtagagcccgagcgtgtagtccgtcagcttcgcggagacgagccggccctgttccggccgctcgagcgtgatcgcgatatcggcctcgcgctgcgacagcgagaaggagcggggaaccggcaccagctgtatccgcagttccggatgccgcttgatcagccggcccagccgcggcgccagaaacgcgacgccaaagccgtcgggcgcgccgatcctcaccgtgccggcgatgctgctgtcgagatggccgaggcttgcctgcgcgcgcagcatctcggtctccatccgctcggcggcatggagaaacgtctcgccctcggccgtaagctcgcagccattggtgcgccgaacgagcagccgcgtcttcagccgctcctccagcgtcgtcacccgccggctcagcgtggcgtggttgacgccgagtcgcttggaggcggagaggatttgcccggttcgcgccacggccaggaacattcgcacatcatcccagtccaaatcggcctccggctttaatttttgcacagcggttgcttaaacctgttcattgatctgtgcaaattgaagtgcgatgctggttcatcaaacaaagactgtgaaaccagaggaggcacacccatgcatgagattggtcatttcatcggcggcaggcacgtcgtcggctcgagcggccgttcgagcaacgtctacaacccggcaacgggcgaagttcaggcgacggtcgcgctcgccagcatcgaagagatgcgcgccgccgtcgaaaacgccaaggccgcgcagccgaagtgggcggccaccaacccgcagcgccgcgcgcgcgtcttcttcaagttcgtcgagctcttgaacaagcatatggacgaactggccgtcatgctctccagggagcacggcaagacgatcgaagattccaagggtgacatcgttcgcggtctcgaagtctgcgaattcgtctgcggcattccgcacttgcagaagggcgagttcaccgagggcgccggtccggcgatcgacatgtactcgatgcgccaggccgtcggcgtcggcgccggcatcaccccgttcaacttcccggccatgatcccgatgtggatgttcgcgcccgccatcgcctgcggcaacgccttcatcctgaagccctccgagcgcgatccgtccgtgccgatgcgtctggctgaactgatgatcgaggccggcctgccggcgggcatcctcaacgtcgtcaatggcgacaagaccgccgtcgacgcgatcctcacggacccggatatcggcgccgtttccttcgtcggctcgacgccgatcgcccgctatgtctacggcacggcggcgatgaacggcaagcgcgcgcagtgcttcggcggcgccaagaaccacatgatcatcatgcccgacgccgacatggatcaggccgtcaacgcgctgatgggcgctggctacggttcggccggcgagcgctgcatggcgatctccgtcgccgtcccggtcggtgaggaaaccgcaaaccgcctggtcgagaagctgacgccgaagatcgaggcgctgcgcatcggtccttacacagacgacaaggccgacctcggtccgctcgtcaccaaggaagcacaggcccgtgtctccggtctgatcgacaagggcgtcgaagagggcgccaagctcgtcgtcgatggtcgcggcttcaagctgcagggctatgaggacggctacttcgtcggcggcaccctgttcgacaacgtcacgccggacatggacatctacaagaccgaaatcttcgggccggtcctctccgtcgttcgcgccaagaactacgaggaagccctcgagctgccgatgaagcacgaatacggcaacggcgtcgcgatctacacccgtgacggcgatgctgcccgcgacttcgcctcccgcatcaatatcggcatgatcggcatcaacgttccgatcccggttccgcttgcctaccactcgtttggcggctggaaggcttcgagcttcggcgacctcaaccagcacggcacggactcgatcaagttctggacgaagaccaagacgattaccgcccgctggccatccggcatcaaggacggcgccgagttcgtcatgccgacgatgaagtaagtgtttgtaaagattacgttttggaagcgggctccgtaaggggcccgttttcgttcaggacctggcggtgcccgcctttataacgtgattcattttttcatctttttctattttggaattgttcaaaactatcaaaggcactatatacagcgtctgacacgaacgaatctggagatcggcatgcgtttgaccaagcagaccaactatgctgttcgcatgttgatgtactgcgctgccaatgaaggcagtctcagccggattccggaaattgccaaggcatacggcgtttccgagctctttctgttcaagatccttcagccgctgaacaaggccggcctcgtagaaaccgtgcgcggccgcaacggtggcgtgcgcctgggcaagcctgcggacaagatcagccttttcgatgtcgtgcgcgtcaccgaagacagcttcgccatggcggagtgctttgaagacgatggcgacgtcgattgcccgctggtcgatagctgcggcctgaactcggcgcttcgcaaggcgctcaacgccttcttcgacgtgctgacgcaatactcgatcgacgatctggtcaaggcgcgtccgcagatcaacttcctgctcggccttgacggcgatcatcatcacggcaagccgcgggccgtcgcgccggctgcctgaagtagcaatcgtgaatatagcgcaaccgcggtcatcgagcatggccgcggttgttttgttttcaaaaatagctcgaaagcgctcgttgagcgtgtcgtaatatgtcgtctccgacgcgaaattataccaaatgcgacgaaaacaagggttatccagcgcgaatatttctaaatgcggcctattttcggcggaaaattactaaagttgtccgactggaaaaattttccaccggggtcgttgatttcagcaaataaatatcgttccatcggcgctcgatccggaggagcgctctgggatcagaaaaacgtataaaagaacaaacctgggaaacgaaatcatgaaaaagatctctgtccttctggcagcgactgttttggcctctgccatggcgtcggccgcttggtccaagacgctggtgtattgctcggaaggatcgccggaaggcttcgatccctcgatctacacggcaggcaccactttcgacgcctcgtcgcgtaccgtctacagccgcctggtcgagttccagaaaggcaagaccgaaatcgagccgggcctcgccgagagctggaccgtttccgatgacggcctgacctataccttcaagctgcgtccgggcgtcaagttccagaccaccgagttcttcacgccgacccgcgatctgaccgccgaggacgtcgtattttcgttcgagcgccagctgaaggcagatcacccctgggccaagtacgtcgccggcgtttcctacgaatacgcggccggcatgggcttccccgagctgatcaagtcggtcgagaaggtcgatgacctcaccgtcaagttcacgctgaaccgtccggaagcaccgttcctcgccgacctcgcgatggacttcgcctcggtcgtttccaaggaatacgccgacaagctgcaggccgatggcaagatggagcagatgaaccagatgccgctcggcaccggtccgttcactttcgtcgcctaccagccggatgccgtcatccgctacaaggccaacgaaacctacttcaagggcaaggaaaagatcgacgatctcgttttcgcgatcacccgtgacgcttcggttcgcgctcagaagctgaaggccggcgaatgccagatcatgccttacccgaacgccgccgacatcaaggacctcaaggccgattcgaacctcaaggttctggaacagccgggcctgaacgtttcctacctcgcctacaacacgcagcaggcaccgttcgacaagcctgaggtccgcaaggcgctcaacatggcgatcaacaagcaggcgatcgtcgatgccgtcttccagggcgccggccaggttgccaagaacccgatcccgccgacgatgtggtcctacaacgacgccatcaaggacgacgcctacaaccccgacgaagccaagaaggctctcgaagcggctggcgtcaaggatctttcgatgaagatctgggccatgccggtttcgcgtccgtacatgctgaacgcacgtcgcgccgccgagctgatgcaggctgacctcgcaaaggtcggcgtcaaggtcgagatcgtcagctacgaatgggccgaatacctgaagctctccaaggacgttaagcgcgacggcgccgccatcctcggctggaccggtgacaatggtgatccggacaacttcctcgacacgctgctcggctgcgaagccgtcggcggcaacaaccgcgctcagtggtgcaacaaggacttcgacgccctcgtgaagaaggccaagacgaccgccgacgttgccgagcgcaccaagctctacgaagaagctcaggtcatcttcaagaaagaagcgccctgggcaacgatcgatcactcgacggaattcgttccgatgagcgccaaggtttccggctatgtgcaggatccggtcggtgttcaccgcttcgatggcgttgatatcgccgaataaccaaaactatgcaaagatgcccgacaagatcgggcttggccggcggtcaggtttgatacctgaccgccggactaatatggacatgtgatatgtttcgttttttcatcgggcgcctagcggtcctgattcccaccttcctcggtgtttccatcatcgccttctcgttcatccgcctgttgccgggagatcccgtcatgctgatgtcgggcgagcgcgtcatggcgccggagcgctatacccagatcatgagcgaccttggcctcgaccggccgctctacgtccagtacatcgattacctcggtaatctcgtgcagggcgatttcggctcgtccatcgtcaccaagcgtccggtcctgcaggaattcatttcgctgtttccggccacgatggagctggcgctctgcgccatcctgttcgccatcatcctcggcatcccggccggcatcttcgccgccgtgaagagggggacatggttcgaccagggtgtcatgggcgtggcgcttgtcggctattcgatgccgatcttctggtggggcctgctcctcatcgttctcttctcgaatacgctgcagtggacgcccgtctccggccgtatctcgttgatgtacttcttcaagccggtcaccggcttcatgctgatcgacagtctgctgtccggtcaggccggcgccttcaagtcggccttccggtcgctgatcctgccgaccatcgttctcggcaccatcccgctcgccgtcatcgcccgccagacccgctcggccatgctcgaggttctcggcgaggattacgttcgcaccgcccgctccaagggcctcgcgcctcttcgggttgtcggcgtgcatgcgctgcgcaacgccatgatccctgttgtcacctcgatcggcctgcaggtcggcgttctgcttggcggcgccatcctgacggaaaccatcttctcctggccgggtatcggcaaatggatggtcgatgcggtcttcaagcgcgattacgccgtggtccagggcggtctgctgctgatcgctgccatcatcatgctcgtcaatctgatcgtcgatctcatgtacggtctcatcaacccacgcatcagacactaggagcggctcatgagcacgacaaacaccacgtctgcccagccctccggcctttcggagttctggtactacttctcccgcaacaagggcgcggtcatcggcctcgtcatcttcgtcttcgtgctgctcctggccatcttcgcgccgtgggtcgcaccacatgatccgaacgtgccttcgggcatgcagcgcgtgccgccggcttgggcggaaggcggcaacagccagttcctgctcggcaccgatgcggttggtcgcgacatgctctcgcgtctgatcttcggcacccgcttctcgctgttcatcggcctcgtcgtcgcctcgctgtcggccgtcgccggcgtcctgctcggcctcatcgccggttacttccgtggccgcaccgatacggtcatcatgcgcgtcatggatatcatcctggcattcccgtcgctgctgctcgctctcgtgctggtcgccgttctcggccccggcctgttgaacgccatgatcgcgatctcgatcgtcaaccagccccacttcgtccgccttacccgcgccgccgtcatcagcgagcgcgagaaggaatatgtcgtggcatcgcgcgttgccggggccggcacgctgcgtctgatgttcaagaccatcctgccgaactgcgtggcacccctgatcgtccaggcaacgctcgccttttcggcggctatcctcgacgcggcggccctcggcttcctcggcatgggcgcccagccgccgacagccgagtggggcacgatgctcgccgacgcccgcgagttcttccagagctcgccgtcgctcgtcactttcccgggcctgtgcatcctcatcaccgttcttgccatcaacctgatgggcgacggtctgcgcgatgcgctcgatcccaaactgaagaggtcctgatatggcacttctcgaaatcgaaaatctcgtcgtcgagttccagacctcgaccggcaccttccgcgccgtcgatggcgtgtcgatgaaggtctcggccggcgaagtcctggccatcgtcggcgaatccggctccggcaagtccgtctccatgctggcggccatggggcttctgccctggaccgccaaggtcacggccgacaagctggtcttcgacggccgcaacctgctcggcatgtccggaaccgagcgccgcaagatcatcggcaaggacatgtcgatgatcttccaggaaccgatcgccagcctcaacccgtgcttcacggtcggcttccagatcgaggaagtgctgcgcattcacctcggcctcggcaaggcggaacgccgcaagcgcgccatcgagctcttcgaggccgtcggaattccgaacccggccgagcgcctcggccatttcccgcaccagatgtcgggcggccagtgccagcgcgtgatgatcgccatcgcgatcgcctgcaacccgaagctcctgatcgccgacgagccgaccacagcactcgacgtcacgatccagaagcagatcctcgatctgctgatgcgcctgcagacggaacacggcatgggcctcatcatgatcacccacaacatgggtgtcgtcgccgagaccgccgatcgtgtgatcgtgcagtacaagggtcgcaagatggaagaggccgacgtgctgtcgctgttcgaagcaccgaagagcgattacacccgtgcgcttttggcggctctgcccgacaacgccaccggcgaccgcctgccgaccatcggcgagattttcaaacagacgagtgagggagcggcccaatgacgccagtcctcgaaggcaagaacatcgtccgcaactactttctgccgggcggcctgttcaagaaggaaaagaccgtccacgccgtcaagggcgtgaacttcaaggtcgatgagggcaagacgctcgccatcgtcggtgagagcggctgcggcaagtccacactcgcccgcatcatcaccatgatcgatccggcaagcggcggcgaactgttcatcgacggcaagaaggtggatatcgccgccggcgatctgacgcccgagatgcgccgcaaggtgcagatcgtcttccagaacccctatggttcgctgaacccgcgcaagaagatcggcgacatcctgatggagccgctgatcatcaacaccaacacgcccgccgccgaacgccgcgaactggcgatgtcgatgctgaagaaggtcggcctgcaggaggtccacttcaaccgctatccgcacatgttctccggcggtcagcgccagcgtatcgcgattgcccgcgcgctgatgctgaagccgcggcttctggtcttggacgagccggtctcggcgctcgacctttcggtccaggcacaggtgctgaacctgctcgccgacctgcaggacgagctgaacctgacctacgtcttcatcagccacgacctctcggtcgtccgctacatggccgatgacgtcatggtcatgtattacggcgaggccgtcgaatacggatcgcgcgaccaggttttcaacgacccgcagcacagctataccaagacattgttcgcggcgacgccgcgcgccgacgtcgacaccatcagggcacgtctcgcccgcaagaatgcggccatcgcgtcgtaagcttgggtctcccgacacggcggatcatgccgaggtgaggagagattccggaatgtcaggacaaaacacgcgcccccatgccatcatcgtcatgggggtcagcggctccggcaagtcgtccgtgggcgaggcgatggcggaagcgctcgccgtcgaattcaccgaaggcgatgcgctgcatccggcgtccaatgtggagaagatgtcgaagggcatcccgctcaccgacgatgaccgcatgccctggctcgatatcatcggcaagaccatgaaggcggcgctcgaccgcggcgagggcatcgtcctgtcctgttcggcgctgaggaagagctaccgcgaccgcctgcgcgccgccgtcgacggcaacctgttcttcgtctacctgcacggctccagggagcttttgaccgagcgcatgggcgcccgaaagggccacttcatgccgctctccctgctcgaaaaccagctggcgacgctggaagtcccgaccggagaacccggcgtggtcaccgtcgatatcgatgggacgatcgacgagatcgcgaagacggcgctccgcgatctcaaggctttggtgatttcctagccgtcgttcctgagcaggatcttcttctcgaagaagaagtagggccgcaggcggacgccgatgatgttgcccgcgaaggccgccactgcccagagatagccatgcaggctgcccgacgcgatgccggagaaataggcgccgacgttgcagccataggcgatgcgcgcgccgtatccgagcagcagcccgccgatgacggcggccagcagcgagcgcagcgggatatcccagctcggcgcgaagcgaccggccagcgatgaagcgagcatggcgccggcgatgatgccgaaattcatcaccgaggtgatgtcggcgaatacgctgtcggagagcgccttggcgttggcgggcgtctgccagtatgaccaggcggtcggatcgatgccgataagctgcgcgcccttggcgccccacagcgcaaatgccgaggtgacaccccagggacgtccggcgatcgacagcgtcgcgaagttgagcagcgccaatgcgacggcgccgagcaccagcggccaggggccgcgcaggaagcgggaaatgcctcggcgtggcgagggggcggccacttccagcgatccatgccagcgcttctcgaccaatatagtcaggccggcaatggcggcgaagatgagcagcgaaaccgcgatgccgcccgcggcgccgaagctcgtcaccagcgatgtcggcggcagcgatggcaggctcacccaccagtcgaagttgacggtgccgagcagcgatccgacgacgaagaagaacagcgtcaccagcatgcgtgcattgccgccgcccgccgtgaacagcgtgccggaagcgcaaccgccaccgagctgcatgccgataccgaacatgaaggcgccgacgatgacaccgatgcctgccggcgctaccgagccccgcacctcattgccgaacagcgtaccgctggcgagaaatgggaagaacaaaacgacggcgatggcaagcaggatcatctgcacgcgtaatccgcgcccgcgtccatccatgatgaagacgcgccaggcggaggtgaagccgaaggcggcgtgataaagcgcgataccgagcgcgccgccgacgagaaacagcgcaccctgcgccgggccgtaataatagccgagcagcagcgtcccgagaacgagaacgagcagggagccgaggcccggcgtgccgagcgagggctcgcgggtttcgagaacggaggtggaggcaatggacatgagaaatttcctaacgtttcccgctcgttttaaggattatcccgccagtcgtgtaggaatcacgttgcgtcatccgccgccggggcggattcctgtcctctccgtgggctaaaatgcgaaaagcaatgatctctacggattaaaccgctgcggcgaataggcggagatatcgacgaacggcctttcgcccgtcatctgctccgccagcgccctgccggtcaccggcccgagcgtcagcccgtgatgggcgtggccgaaggcgaaccacaggccctcgtggcgcggcgccttgccaataaccggcttcatgtcgggcgtgcaggggcgggcgcccatccagggttccgggtcgagccgctcgccgagcggaaacacgccgcgcgccaccgtttcggcgcggtcgagctgcaccggcgtctttggcgcatcgatcgccgcgaactccgcgcccgtcgtcaggcggatgccgttttccatgggcgccatcagatagccgagctccgtgtcggccacggtgttgttgagcacggcgttgcccttcgccgaataatgcatgtgatagccgcgcttgaccccgagcgggaaggcgtagccaagcctcttcgtcgcgaccgccgcccatggtccgagcgccatcaccgcctcgtcggcctccacgggaccctcgacggtcgcgatcttccagccggcgccgaacttgccgaaggagttcgcatccccggtgataaagcgaccgccgatgctttcgaaatagcgcagatagcttgccgtcagtgcctgcggattgatgaccgaccacgggtcgcgccacttcaacgcgccgacgaagccgagattgagatccggctccagccgcgccagatcgccggtatccagcttgtcgaagccgacgccgaattcccgctgcagccgttcggcctcggcgaattccgcgtcgcgcttctcaccggtgcgaaacacctcgatccagccgttcttgcggatcagatgctcggcgcccgccgcctcgatcaggtcgttatgttcggagatcgaatgcgcgatcagcggcgcataggccttggagatcatctgatgacgcttggtgttcgaatgccaccagtagcgcgccagaaacgacagctggcccggcagcgccttcaggtggtaatgcgcgtcgatacggttgttgaaggcgtagcggacgagaaggccgagctgctgcggaaagccgtagggcaccacgccctcgcgctggatcaatccggcattgccgaaggatgtgccgttgcccggcggcttgcgatcgatcaatgtcacctgccgtccgcgccgctgcagatgaatggccgtcgatacgccgacgatgccggctccaagcacgattacgttcttcgtcattttcccacgaaacccacgatattatcgcgatcaaaaatgcccctccgccaagccgcgtgcaaatgaaaaatcgcattcatttcaaaaacattgccgtcttcagggcacggttctccaccgagatgcgaagccacagcatcagcccgttcaagacggagaaaatggcggcgaagagcggcatcccgaacgcaagcggcagcaccgcgatctcgccgatcacgaccgcgtagttcgggtgcgggaacagccgatacggtcccttgcgcaccagcggcgcccccggcagcacgatgatccgcgtcgtccaccgccccttgagcgtggccagaacccagagccggccaagctgcagcaggacgaagagcatgaaccatatcggctggaccggatggccgggcgccaagaaccagagcccggcaagccagctcgcatgcagtgccaccatgaccggatagtggtcggcgccgatctcgcgggcaccgcgcgccatgagcgcgcgagtattgcgccgcgcgatgatgagctccgccagccgttgcagcgtcacgaagccgaggatgaggatcgagggccacatcgtcaggccctcgtcaacgtcacgcagctggccgaaaaacccggccccatcgcgatcatggccgcccgctcgggcaatccctggcgcagcacccgctcgagcacgaaaagcaccgtcggagacgacatgttgccatattcctcaagcaccgcccgctcatggtcgagcgccgaggatgggatcgacaaagcggtctccagcgccgccagaacgcgtgccccgccgggatggcagatgaagcggtcgatatccgcgcgcctcagcccgttgcgatcaagaatgccgtcgatcgccggacccagctccttctccgcgaagggcggaagcgattgcgccagcacgatgccgaagccggtatcgtcgatcttccagcccatgatgccgagcgtatcgggaaacagatgctctccggtggattcgaccgcggcaagcccctccggtccagcccgcaagacgcaggccgccgcaccatcgccgaacagcgccgtggcgatgatattcgcccgcgtcagctcgtccagccggaaggccagcgtgcagagctcgatagagacaaagagcacggtcgcgccgggccgcgccttggcgagccgcgccgcgatcgcgaagccggaaacgccggccgcgcagccgaggccgaacaccggtaggcgctccacatccgtccgaaacccgatctcggaggccagctgcgcatcgaggctgggggtcgcgatgccggtcgaggagaccgtgacgatgcagtccacatcggctccgccgaggccagccttatcgagcgccgccgtcacggtcagccgaaacaggctgcgtgcctcctcctgataggcctgcatccgatcttcccagccgtgcggctcggtgaaccatgcaagcggccgcgcggcatgacgggtgcggatgccggcattggtaaaaacgggcgcgagatgcgcgaagtctttgagccggctggaaaacagccgtgccgacgtctccgcggcttcctcctgcgtgatgacatgcagtggcgccgcggtggcgaggctgagtagtttgacggtgtcgttcacgaaaatgctcctgttcgtcccccggcgcacgcggagcaaacacgccaggccgggctttattcgccaatcgctctcacgaaacggtgatcggaaaaatcgggacacccgccgaataaacccgccggctgcggtgttcattcgccgcaaccctgtcctcaagaccaaccgtgtctcagacattgtcccgaaggagatattccatgacctcagcaacctctcggattgcatccgtcctgatcagcggcgcgatcgcgaccttcgcgttcaccgcgcctgtgttcgccgccggcggcgacgatagcggcggctccaccacgcccacctgcaagaagggtgaggtctatgacaagaagacgcagaaatgcgtcaagcagtcgggcgccaacatcaccgacgagaaccgcaccgaatacgcctattcgctggccaaggccggccgttacgacgaggcgctggccatgctcgacacgctgaaggaccagaacaccgccgaggccctgaactatcgcggctacgcgacgcgtaagcttggacgcacggatgagggcatcggctactatctgaagtcggtccagctcgatccgcaatatgccaaggtccgcgaatatctcggcgaagcctatgtcatcaagggtcgcatcgatctcgccaaggagcagctcggcaccatcaagacgctgtgcggcacgagttgcgaggaatatcgcgatctcaacgaagcgatcactaatccgtcgaagatctgaggagcgggaacgcccgataatgtgacgaggaacatgccgatggtcgtcgcctacacgacatttcctgcctatagtcacgccaacaagaccgcgccggctcgcccggcgcggtcttcggcaaaccccgtggcggaggcggccatcgcaagcgaatccgatatcaggagcggtctgacggaaaacctgtcgcggctctggcgctacggtctcgtgctctcgcatcgccgcgatgtcgccgacgatctggtgcagcagacctgcgtgcgcgctctcgagagggccgcgcagtttcaggcgggcacccggctcgaccgctggctgtttgccattctgcattcgatctggctcaatgaaatccgctcgcggcgggtccggcaagggcagggcttcgtcgatgccgagcaggcgctcgtcgtcgatggcgcgcgtgaaacggagacgcatgtcatggccgcgcaggtgcttcgtctcgtcggcgcgctgcccgacgcgcagcgtgccgcggtcttcctggcctatgtcgagggcctgtcttacaaggaggtggccgctgtgctcgatattccgatcggcaccgtcatgagccggctcgccgccgcccgcgccgcgctggccggcaatctgaaagaggagggcggacgatgaccgacaagaccacgatcccctctgacgaagagctgaccgcctatctcgatggcgaactgccacccaccgaggccgcgcgcctcgaagcactcctggaaacggacgccgagctggccgcccgccttgaattcctgtcgcgcgccagcctgcccttcgcgcaggccttcgatccgctgctgtcgcaggcgccgaagaccgagctcgaagccatcctctcgcgtctctccgccacaccagtggcaacgccggcccccagccgccgtcgctttatcggcgcgctcgccgcctgcttggttgccggcgtcatagccgaccgcgccttcatcggcgtgagccgacaactcgctgctaccgatgaaaacagcgaatggcgcgccacggtcgccgaatacatcgcgctctacacgccggaaacgctggccggcccggtgccgtcgcttgcgtcgcagcaagcgcagctggcggcggtcgaagcaaggctcgggctcagcctttcgccggaagccgtggcgctatcgggcatcgatttcaagcgggcgatgcttctgcaatatgacgacaagccgctcgcccagcttgcctatctcgaccccgagacaggccccctggcactctgcatcgtccgctccgacgatggcgccagaccgcccaacgtcgaagcccgcaagggcatgaacgtcatctactggtcggataagacgcatgccttcatgctgattggccatgcgtcgctggaacggatgaaggtgttggcgggggatgtgaggatgcagttggctgcttgagggggacggtgttgggcgttgtgccgcgtggcacccccctctgtcctgccggacatctcccccacaaggggggagatcgactcgcggagaggtttacgccaaacgttgaggtggatgcgagcggttaagcccagccaatctccccacctgtgggggcgatgcccggcagggcagaagggcgcgccccgcggcaaaacgccaaatctaagagacatcaaataattagctggcagactcagcgcccgaggccccctcatccgacgcttttgacatcatgctcttgaagaaaggcgtcgagccgcttcaggcccgccgcgtcgtaggtgacccgcagccgcgcgtcaccgggatggatggcgatgtcgagatggcttttgccgacatcgattccggcacagatcatgctatcatcggtcatcttcgtcgtccctgtcttggatacgaaccccaaggttcctgcaaccacacgggcctgatgaagagccggttgcgatcctgctccccacagcccctgacggctgagaaggtgacgatccgacaaccagctgccgggcgggtggccacccgcccggcagaaacaactatctcatattttgatcatccaagaaggtgccggcaggcggatgagggggccaaccgcacaacgtcaactgtcccccaaacacaccctaccgccacatcgtccgcatccgcgccgcgacatccacccttatctgctgcgtgctccgctccgaaggcgtcgccgccaccaccggccatgccgcggtctcgaaatactgcagaagcgtcaccggaatgaaccgcgtgcgcgatgcatagacatgccggtcgccctggccgtgctggccgctggtgaagaagcgttgcggggtgatcagcgtcaggctgtccttggcccgcgtcatgccgacatagagaagccggcgttcctcctcgatctcctgcgtcgtgccgacggcgaggtcggaggggatgcagccgtcgacgacgttgagcatgaacaccgcccgccactcctgccccttggccgaatggatggtggagaggatgagataatcctcgtcgagcagcggcacgcctgcctgatcgctggtggcgtcgggtgggtccagcgtcagctcggtgaggaagcgctcgcggttggcatagccggaggcaatctgctcgagctgcaggaggtcggccttgcgggtgtcggcgtcttcgtggatgcggtcgagatgcggttcgtaccattcgcgcgcctgtgcgatctcggccggccatggcccgttcgccttgcgcagcccctccagcagctgcaccagcgccggccagttttcaccggtcttggccggcggcgggatttcggcgagcgccatcagcggctcggggtcggcggcgatcgtgtcgaggatcttgcccgccgtctgcggtccgatccccggcagcatcttcaacaggcggaagccggagacccggtcgcgcgggttctgcgcgaagcgcaggatcgccagcatgtccttcacatgcgccgaatccaggaatttcagcccgccaaatttcacgaagggaatgttgcgtcgcgtcagctccacttcgagcgcgccgctgtgcgaggaggtgcgaaacagcaccgcctgctgcttcagcgtcatcccgatttcgcgattggcgagcacctgctcgacgatgtagttcgcctggtcgttctcgtccttgacggtcagcagcttcggccgctcctcggattgccggtcggtccagaggttcttggtgaagcgctcgcgcgccagttcgatgacaccattggcggccgcaaggatcgtcgtcgtcgaacgatagttgcggtcgagagtgatgatatcggccggcggctcgaaggtcttggggaaatcgagaatgttgcggatcgtcgcggcgcggaaagagtaaatggactgcgcgtcgtcgccgacaacggtcagcccgcgcccaccgggcttcagcgccatcagcaccgaggattgcagccggttggtatcctggtactcgtccaccatcacatgatcgaagcgcccgccgatatcttcagccagttccggatcgctcaccatctgcgcccagtagagcaggaggtcgtcgtaatcgagcacgttctgcgcctgcttggcctcgacataacaggcaaacagctcgcgcagctgctcttcccaggtcgccacccacggataccaggtcttcaggacctcggagagcggcgtctcggaattgacggtgcgcgaatagatcgcgagacacgtccccttggtcggaaaccggctttcggtcttcgagaagccgagctcatgccggatgaggttcatcaggtcggcgctgtcttcccggtcgtgaatcgtgaaatcgacattgaggccgatctgctcggcatagatgcgtagcaatcgcgcgccgatcccatggaaggtgccggcccaggtcagcgcgtcggtcatcacggcggaattggcgccgagcacctgccggcagatgcgctcgacgcgccgcgccatctccgacgccgccctgcgcgagaaggtcatcaacaggatgcggcgcggatcggcgccgttgacgatcagatgcgccacccggtgcgccagcgtgttggtcttgcccgatccggcgccggcgatgatcagcagcggaccgcccgtcgtatccggtccctgaccgaccccatgctccacggcaaggcgctgccgatcgttcagtttctcgagataggccgccgcctgcatctattcttaagcctctagcatacgcgccgcgatggaaacgcgactcgggaacaaatatggaacgtatcagtgctccctgatgtttggaagtcccgcctggctgtcaccacagggaaacggactcgaccgaacatttggtgcactgcggaaaacgggcgacatatcaggtcttgcgtggcataagggcgccgaaaacctgttttggaccacgcttcccatgatccgcatcgaaaatatcagcaagcagaacagccaccgcatcctcttcatcgaggcctcggcggcgctcaacaagggcgagaagatcggcctcgtcggccccaacggcgccggcaagacgacgctcttccgcatgatcaccggcgaggagcagcccgacgagggcaatgtcgccggtgaaaagggcctcacgatcggctatttcaaccaggatgtcggcgaaatgtcgggccgcagcgccgtggccgaggtcatggagggggcaggccccgtcagcgttgtcgccgccgagctgcgcgaactcgaagccgagatggtcgatcccgacaagctcgacgagatggaccgcatcatcgagcgctacggcgaggtgcaggcgcgctacgaggagctggacggctacgcgctcgagggccgcgcccgcgaagtgctcgatggtctgagcttcacccaggaaatgatggacggcgatgtcggcggcctctccggcggctggaagatgcgcgtggcgctcgcccgcatcctgttgatgcgccccgacgtcatgctgctcgacgagccgagcaaccatctggatctcgaaagcctgatctggctggaagagttcctgaagaactatgacggcgcgcttttgatgacatcgcacgaccgcgagttcatgaaccgcatcgtcggcaagatcatcgagatcgatggcggccagctcacctcctattccggcgactatgccttctacgagcagcagcgcgcccagaacgagaagcagcagcaggcgcagttcgagcgccagcaggccatgcttgccaaggaaatcaagttcatcgaacgcttcaaggcgcgcgccagccacgcgtcgcaggtgcagagccgcgtcaagaagctggaaaagatcgaccgtgtcgagccgcccaagcgccgccagtcggtcgccttcgaattccttcccgcgccgcgctccggcgaagacgttatcaacctgaagaacgtccacaagaagtacggcagccgcacgatctatgaaggcctcgacttcatggttcgccgtaaggaacgctggtgcatcatgggcatcaatggcgccggcaagtcgacgctgctgaagctggtcacgggctccaccgagccggatcagggcacggttgcgctcggcgccagcgtcaagctcggctatttcgcccagcacgccatggacctgctcgatggtgaacgcacggttttggaatggctggaggatagtttcccgctggcgggccaggcgccgctgcgggcgcttgccggctgcttcggcttttccggcgacgacgtcgaaaagaagtgccgggttctgtcgggtggcgaaaaggcacgtctcgtcatggccaagatgctgttcgacccgcccaacctgctcgtcctcgacgagccaaccaaccacctggatctcgacaccaaggaaatgctgatcaaggcgctgtcgcaatacgagggcaccatgctcttcgtcagccacgaccgtcatttcctggcggcgctgtccaaccgcgtgctggaactgacacccgatggcatccatcagtacggcggcggctacactgaatacgtcgaacgcaccgggcaagaagcgccgggtctgcgaggataatggaaggggtggggcggtacgtcctcctcactctccctcatcccggccttgtgccgggatccagccggcccaagtccttgggccgagaagagtcttttcacggcgcagacgcgccgtggctggattcctgtgacatcgcccggacgaagtctgggcacaggaatgagggcggagagtggggccgccctatcgccactagagaccgaacggaagcggaaacgttcctgttatgcgcgggcgcttacgcccgctcctcccaaaccctggcaatctccacgatcgtcttggccgcccgctccatgtcctgacggctcacccattcgagcggcgaatgaaacgcgtggccgccggcgaagatgttggggcagggcaggcccatgaaggagaggcgcgagccgtcggtgccgccacgaatgctgccgcgcttcggttccatcccggcacggcggatgccctcgatggcgttttcgacgatgtcggggtgccggtcgaccacttccttcatgttgcgatactgctgtttgacctcgaacgtgtaggtcgagcccggatagccggccatcacttgcctgacgatcgcttccagcatctcttccttggccgtcagccccgcattgtcgaaatcgcggatgatcagcccgatctcggccttctccatcgagccggtcacgccggtcggatggatgaagccctgccggcccgatgtcgtctcggggccgatatccctcggcagccggtcgatgatcgcgccggcgatcctgatggcgttttccatcttgcccttggcgaaaccaggatggatcgccacgccctggatggtgatctcgacgccgtctgccgaaaacgtctcgtcctcgatatgcccggccgtcgaaccgtccatcgtgtaggcgaaatcggcgccaagcttctctaggtcgaccttgtcgacaccgcggccgatctcttcgtccggcgtgaacaggatcttgatcgtgccgtgcttgatatcggggttggcgatgaggaacgcagccgccgtcatgatctcggcgatccccgccttgtcgtcggcgccgagcagcgtcgttccgtcggtggtgatgatgtcgttgccgatctggttcttcagttccggatgctcgctcacccggatcacctgctgctgatcgccggtcagccttatatcgccgccttcgtagttgcgcaggatccgtggcttgacgttggtgccgctgaaatcgggcgccgtgtccatatgcgagcagaagcagatgacgggcacctgcttgtcggtattcccgggaatggtcgcgtagatatagccgcgctcgtcgagatgcgcgtccgaaagcccgatcgccagcaattcctcgaccagcacgcgcccgagattcctctgcttttcggtggagggctggctcggcgattgcgggtcggattgggtgtcgatgacgacatagcgcaggaagcggtcggtaacggtatcggtcatgatgcggtccattcgtctttttcaaccgatcactgctctatccctcatcggccctctggtgaagcactttcgctgtcaggcaggtcggcctcgcgcagccggtagccgacgccggtttcggtggtgatgtagtgcggttggtcgggtgtcgcctcgatcttctgcctcaactggcgcacatagacgcgcagatactgcacatccgccgccggtccccagatctgcttcagcatgaactgatgcgtcagcaccttgccggaatattgcgccagcacccgcaggatgtcgtattccttcggcgacagtttgatctcgcgctcgtccaccttgacgatccgtttgacgaggtcgatcgacagcccgccggtgcgaaacaccgccttttcgccctgctgctgcagccggtggcgcagcgccacgcggatgcgggcgccgagctcgttcatgccgaacggcttggtcacgtagtcgtccgcgcccgtctccagcgccttgacgatcccgccttcatccgtgcggctggagaggatcacgacgggtgtcgccagcccctgttcgcgccattcgccaagcagggcgtggcccggcgtgtcgggaagtccgagatcgagcacgatgagatcggggctgacatcgccgacacgggcgcgcgctgtcgccgcgtccggcgcctcatgcacctcgtacccctgcgccgtcaggccaacgcggagcagcttgcggatagggggctcgtcatcgacgacgaggattttcacgggcgagccgctcatgtcatgtcttccagcttcgtgatgtcattcgtgatctcttgcgggcgcggcagcctgatggtgaagacggcgcctgaccggtcgggccggttcgcggcggtgatggtgccgcccatcgcctcgacgaagccgcggcagatggaaaggccaagcccggtgccggcccgcacccggtcgcccttgcgtacccggtagaaactgtcgaatacgcggtcgagatcatcgctgggaatgcccggcccgctgtccgagacctgaaccatgacgtcgccggtgccgatcccagtcccggcccagcccttgatctcgacggcggagccctcgggcgcatatttcgcggcattgtcgagaaggttgaacagcacctgctcgaagagaacgggatcgagcctgacagtcggcaggtccgccggaatggtcacctgcgcgcggtgatgcgaaaggatcttcgccgcgcggcgcagcgcgcttccgacgatgtcgccgacatcgttcagcgccgaattcggttccatcgccccggattcgatccgggtcatgtcgagcaggttggcgatgaagcggttcagccgttcggattcgtcgaccacggtggaaagcagatccgcgcgatcctcctcgctcatcgaggcgaaatagtcgcgcagcgtggtggacgcgccgagcacggcggcaagcggcgtcttcagatcgtgcgagatcgaggtcagcagcgccgagcgcagccggtcggcctcggcggcgagcttcgcccggtcgatatcatcgaccagctggatgcgctcgatcgccagcgccgcctggtccgccagcgcatcaagcaatcgttgttctcccggcgtcaggagcggcccgtcgcggctgtcgctgtcgagcccgatcacgccgacggtggcgcgcccggtgcgcagcggcacataaagccgcctggcgcccggtatcgtatcggcgccgcgcccggcggcttggttgttctccagggcccaacgagcagcggcgatatcggcctcgtcgagcctgtcgccgggcggataatcggcctttgccgcgatggtgccgttctccggcaaaagcaccacgacccgtacctgaagcatcgaggccaactgagagaccgtggccgagagtacgtcgccgagcgtgccggtggcggcgagcttcctcgaaaagagatagagatcctcggtgtcgcgcgcccgctgccgcgccgccgtcgcctgccgctgcaccgtcgccgtcaggttgctggcgatgatcgcgacgccgagaaagaagaagaacgccagcacgctttccgggtcgttgatcgtcatcgtgtagcgcggcggcaggaagaagaagttgaaggcaagcgccccaagcaggcaggaaaacagcgccggccgcagcccatgcagcaccgccgaggtcagcaccgccatcaggaacaccagcgccagattgcgcacgtcgaggacctggtcgagcacgatgccggccagaagcgcgatcagcacatagacgatcgccagcagatacgccttgagatcgaaggccggccgcgccacggccgccttgacgccgcgacgcgcgatatccttgcgctcgtcgcccgcaatgacgtgaacgctgatatcacccgccctgcgcaccaggcgatcggccaccgacggcgagaaccacgcccgctgcttcggcgcgccgatgacgatgtgggttatggcgttcgagacggaataacggatcagctcctgcgccgtctcgcggccggcaatggtgattgcctcgccgccgagctgttccgccagccgaagattggcggcgagcgtatcgcgttcggcctcgccgaggttgatcgagcggttggtctcgacatagacggccacccagggcgctttcagtcgcgcggccatctcggcgccatcacgcagcagcgacgccgaggccggatggtgatcgaccgataccagcaagcggccgcctgaccgaggttcggctgtggcgggcgcatcctgatcgttcagcacatggtcgtccacttcggctcgctgttttcccggcaacaatcgcggcaatgggtccggctcggatgcccgcgttttctcactcatagaagcatcgagcgtgtcattcaacgccgcggcatcggccgttcgtcagccgggatcgcgcgggtcttgctggccagtttggcgaaagcttccagccatagagttcgcggataaagacacagttgcgcgttcggctgaatgccgttcttgaatgtacgaaggcgatctgaatgcccacgaccgagccaagcaattcttcggccaagacccttgccgaattggcatcgttgaaggcgcaagtcgaagagctgacgcagcgcatcgacacccagggctcggtccagttcgaaatcgccaagctgctgcagacattccattcccagctcacggccctgccgcagcagatgagcgagatcgtcaggacggcgatcgaggtcaacaaccacgacaaggtgccgctcaccaaggaagtcctgaccaagttcgattccaggcttggcggcatgggcgtgaacctgcatgtcctgaagcaggtgagccagctgacgctgcgccgacttggccccgcgacgccgaagatccgatgcgtgttcatcgtccagtcgatcccgatgtgggatgcgctggccgacgtctattgggcgatgacccaggatgatcgctaccacccgatggtcgtgtcgatcgacaacagccagctcggacggggcgaattcagcggcgaggacgaagtgcatgccgggctgaacgcgctcggcgtcccgcacatccgcctcgacatgcattccttcgatgcgctcgacatcctgcgcaacctgatgcccgacgtggtgtttcgccagcagcagtgggactctcccgtgccgcatggtctgcgaacgatggagatcaccttcgcccgcatctgcgtcgtgccctatggcatgggcgtgctcgccaatccggatgcgaagggtgaggacgacgaagcctacgccgacaattacgaccagcagtatcaccgcctcgcctggaagatcttctgcgagacggagatgacgcagtcctactaccgctccttcgcccattccgatcccgataagttcgtgctttcgggctaccccaagcacaacaagctgatggaagcgaaaggcaagggtgagtggcctatcgccgagccgaacggccgcgccttccgcgtcatctgggcgccgcatcactcgctggccgtccatggcgagggcttcggcgttttccataagatatacaagcagatgctggattgggccaagtcggccaaggacatccatttcgtgctgaagccgcatcccgcgctggccttcggcgccgagcagagcggccttttccgcgataattcctatcaacgctatctcgatgcctggtcggcgctgcccaactgcgccattcgcgaaggcacctatggcgagctgttcgaggcgtccgatctgatgatcaccgacggcgtctccttcctgaccgaatatcatctcttcgagaaaccgctgatcttcatcgattccggcgtccacgccgccttcaacgcgctgggccggctggccgaacgcgccgcccaccgcgtcgagacctttaaccagctgcgccaggtggcgcttgactacaaggacggcaagccctggcagctggtgaaggagcgcgaggagcttttgaaggtgctgcttccgcacgccgagccggcctccagcatcattctcgattccatcgcagccgatatccagacgtcgaggtcctgagcatgtaccgcgcgcaacaacatgcgttgacaccatccgccgcgaccgacacggccgcacttcccggccacaagcggggcaccggcttcgccttcgatctcgatggcacgatcacccgcgccgagctcctgccgatgatcgcctccgagctgggcctcgaggccgagatgcggcttttgaccgagctcaccatgtccgggctgatccccttcgaggattccttccgtctgcgcttcgccatcctgcgcagcgccggtctcgaccgcatccagtcgatcgtctccgaggtcgagttcgatcccgatatcgagcagttcatccgccaaaaccgagatcgctgcttcgtcgtcacgggcaatctcgacctctggatcgcgccgctggtcgagcgcctcggctgccgcttctacacctccaccgccacgaccgacaaggacggctggatcacctgcctcgacacggtcatgcgcaagaacgtcgccggcctggaactcaaggaggagttcgaccgcctcgtcgccatcggcgacggcttcaacgacgtgccgctcttcgacgtcgccgatatcggcatcgccttcaccggcctgcatggcgcgcccgacgcgctggtctccgtttccaactatgtcgctctcgatgggaagtcgctatgccgtctgttaaacacgctgtaatcgcggcggccggcctcggctcgcggctgggccatggcaagccgaagtgcctggtcgagatcgaaggcgtcaagatcatcaagcacctgctgtcgctgctgaaggatgtcgaggatgttcgtgtcatcgtcggcttcgaggaaaaggcagtcatcgcggcgatccgcgccatccgcccggatgtgctcgtcgtgcgcaaccccggcttccgcagcaccaccacgctgcacagctatgagctcggcggccgctacatcaagggcgattgcctgttcatggatggcgacatgctggtcgagccggaaagtttcgcagccttccttgcatcgtgcgaacccggcgtggcgcagctcggcatcaccaggaccaagacccgcgacgccgtgttcctgacgcgcgaggatggccatgccgtaagcttccgccgcgacgacccgaccgaatatgaatgggccaacatcgcctggctgccggtcgattacttcgccgatatcggcaacacggcggtctatgagcatctgaggcagttcctgccgatccgcacccatgaagtgatcgcctacgagatcgacagcgagcaggatctggcgctggcgcgggacaatctccactacttcaatctgcaggcgctggccggctgaggcatgtcgcgcaaaagcgagcagcggtcttgcgccaccgacatgcgataaaacaaacaagggcttgaagcgggacgagccgatccttgcggatcgcgacacccttcaggcaaacagtcacgaaacggaaccgagcatgagccgcatatacaaggatcaggaaagcatcgacgtcctcaaggtccgcgatttcttcaatggtcgcgccaggaaggaaggcaatgccgtcaacgccgtgatgctgcaatccgagggttcgacgatcgccgtcgaccgcgacatccacgagaagacccacctcctgccgcgcctcgagcgcccgtcgaagatcctcgaactcggctgcggcgccggccgcctcgccaccttctacaacaacaacggcaaccagtatctcggcttcgatttctccgaggaactgatcgcccgcgccaaggccgagatcggcgacgacgagaacgtccagttccaggtcgtcgaaatcccccggatcgcggtcgaggacttccagctgcaaccgcccttcgatttcttcctgatcaccggcctctttatctacctcaacgacgaagccgtccacgacaccttcaagatgatcgccaagctcgcggccccgaacgccacgatctacctccgcgaatccctctccgaactcgacgtccgcctgacgctgaaggagcatttctccgaagaactcgacgaagtctacaacgccatctaccgtacgacggcggaactgaccgaggtgatggctgacacgctggtggaggcggggttcgcgttcgaggtctgcggcgagtatgcgttcccgccggctctgcggaacagggcggagacggcgcagcggtattttacgctgcggcgggggtgaggggagacttcagtccgacgtgttattccatgccgggtgctggaataatgtagtcggcgagataggtctcaaactcgcgggttgttcggtcccgctcgacaagctcaaggaacacgaccgccatgagttcatgatcggcgtctggatgaatatcccatccgtttgcgttcaagaacagaaatccggcatcgaatccggtgcgtttgttcccttgctcgaatgcatgagccatcgcaatgccctgcatgtacgagacggcaagcatcaaggcatcaggttcttcgtaagcccatagatttcgaggacgcatcagcgcaccctccaacctgtcgggaaacagcaacgcgtggttttcacccgtgtctatggtatttgcgagattaattcttacgatgatttcggcgggtagccaaataggttcacttcgcaaggatcgcgtgaaccttcgggaagcgtgtcatagccgtcgaaatgagcttgtcgtagtcaaccggagcctgcgaaggacgcacgtcaaacgtcttccgagtctcgttggtcttggtgacttttacggcgctcatggtttcgccctttcttgctcacacccttttaccatcggcatcagagcgatgcaaatgattcaccgtgacgatagaccgccggatgcggtagcggttccgctatcgccttggtgaagccgtgcggtcacggcaaaatctagcacttataatccgcgctaagtgtatgaatttattggtgagaaaaatttggctggggaacctggactcgaaccaagattaacggagtcagagtgttctaataatcgctgtttttattatgcttcttggcggtgtgttgcgtccatgttgcggactaaaatcccgaggcttcctaaaccgcgaacagagcgcgctcggctgcggccatttccgcaccttcatcagcgctcggaaacaggtgtccataggtgtcaaaggtcacctggatggagctgtgccccatgcgcatctggaccgccttcgcggttagctctagcccgccgtccgctttcctgttgatgcaccagctcgcgtaccagtggcgcagcgcgtggaagccagtgtacttaggctggatgaccgcttccccgtccttgtccttcttccccgtatcgacccacagcccggccgctatctcggtagcccagagcccgcggtgaagcatgttctggtgaaactcgatgttgcccgcctggttggggaatacgagaccggcatcactggcagggcaggcgagcttccattctttcagcgtgttgatgaccatcggcggcagagggaccgtccgctgtcccgcctctgacttcggcatgccaacctcgccgtaccggtccgcccgctgccgaacgtgaagcaaaccctttttcaggtccacatcctcccagcgcaagccgcgtgcctcgctcgatcggatcccggtaaaagtcatcgtcacgagcagcgggcgatatcggccctctgcagcgtccaggatagacttcacctcggcattggtcgggatgtcgacaccaatacgcagtttcgccttggcgcggcgctcagaggctttggtgcctgatctggccttggatagctcgtgcacagcgtttcgcactacaaggcctcgtccttgcgcgtcagcgaggatgctgcctaggctcacggtcacccgtttgaccattgcggccgatcggccattctctctcagatcatcttggaatgagcgcacccacggcgccgtgacctttgtaagcttcacggagccggcgaggggaacgatatgcagctcaagatgctgccggcgctgatccatggatgtgcgttcgagccctgcagcatcgcccgacttcatccagaacttgccagcttcctcgatggtgacagtcgcgctgtcggcaacgtgtgtgccctctcgcacctcgacggtggctgttgctgcgaactggtccgcttccttcttcttggcgaaggtcttcagtcggcgtttgccggtggtgtcaacgtaatcaacgacccaggcggacttctcaacgcccttcggtgtagtccattctcgcttgcggactgacatggtttaacccttgaagtcgtcgtctagatccgaggcgtcgccaaacagcggagctcccgattgttctcgcttctctcggcggcgctcccgttcaaaaaagtcgagcttcgcctcctcaatccactttgtaagatcctcttgctctatgcccgcgattaggtcagcggcgcctttgttgtcgcccgttgtaagccttctcgtcaggtcagctaggagcctgcctggcagcacgtcggtaagtttgaagagatcattcctcggatctggaagcggttctgccaacttctcagtggttccattcacttcgagcatgagggcttcttcctcatcgaggtcagcatcgacttgctgctcataggcttcctctgccagatgctcctgatattgcgcccacagggtctcaatctccgcgcgagccttgtcgcttaccccaacgacgcgccctccgatcactccctcaacggtctctcgcacgtcgatgatgaactgattgatccgagtgtcggaggtccctccttgcagcaccgccaacagcgtgcccagatactgcatcctgtcgtcgacattccactgctgcgggtattcgcgctcgagaaggcggaaaatctcgtcgttgactgtgcggtcatggcgatctgcatagaccttgattcgatcgatcaagtcggccggaagcaccagcggcgatcggaacgactgctctaggcggtcaactatctcggcattcatcgagcgcccagtgacctcagccgcggccttgagtttatctctcatcccgtcaggaaggcggatcatcgcctgttccgagccccgttcagtcttagccataacaacctcattccaactattcctatagcactgtgctaaatcccgattgacgtcaagatcagcacagtgctaaacatttataacattagcacggtgctgatgctggttaatgccatttggcgaaaggaacaacgatgccggaagtcaatgaaaagctgagcttggtctggggcgccgaggaaatcgccaagctaatcgggcgctccaagcgcgcaactttctacatgctcgacagcggtgagcttcctgccaaaaaggttgggggtcgctgggtggccgagcgcaatcgcctcatcaacttctttttggaagctgccgagtgattgggctcaccaaaatagtggcggatagtgaaaacccggcagcgctggcgggcgcttaccgggtcgaagtcatttccacagatcaggacacccgaaagatagtcgctccatccgcgcctgtccacgtcgctgtgttcgatcggtcctactgaaagggacgcagcatggcttatctgatcaaagcaacgcatgagccgggtggaatccctgttgtcgtgcgcgggcgtgatgcccagacgcttcgccgcctgatcgatgcaggcgccgccggtatcagttcgttgatggttcatgctcctcggctgtcggcatacatcttcaagcttcggaaagcaggtttcttaatcgagacccggcacatcccgcacggtggtcctttcccgggcaaccacgcgcattatcgactgctttcgttccctcacgtcatcgaggacacaacaggggaggcgctttgatggtgccgaaccccgcacacgaagacgaggccgtcacagctgcagctcagtggatcgccgaccaggagccccggcaggatgtcattccccagatcaagacccggttctgcctgacctctcttcaagcctctgaggcctgcgcgcttgccaacaagatgcgcatctatcggagggctcacggatgaagcaggcttcacgtgatcagatggaaataaagcatcggtcgaggcgtaaggcgatgtcttccggccaaacgatgctcggcaactgcattctaggaaccgtcaaccggccgaggacctggaagttgtcgctctcgcttgtgcgtctgcgcgaaattgagttggtgataaaggatcggcacggcggcatcattccggatcccgatggtaccgacgatgtggagctctgccttggctatgtcagagcagtcgctcattcagcgcctgagcaggatctgaaagactggtgtgcgcgcttcgccccttgggccgtcgatcggtggcttgaagtaggcaagccgatcctcgaagagacggtaaaacgcaaaaagatgctgccggctgactcggtggcggccctgatgaatgtgacgctggcggagcgcacgacgttgggcctgaagactattgggtcatgcgacgtcaccgcgagcgagcgaaaggaaatcgcaagagagcgcaaacgggagcttgatcgagtgcggcaggaacagaagcgatcagccgaaaagcggaaggatcgtaaatcctatgaggcccagtctctggcgaagctcaagccttgggttgctgctgggatgtctcgtgccacatggtaccgcaagcagaatgagacaggtctgtcgccagtcctattaataacaactagcgacacacttgtctcacaagcagatctgccgccaacgccgccacgcattcaagtgcgccaggcgcgcgtagcgggcatggtcgggggtctggggcatcatgccccggcagggctccaaggggcagagccccatgggataggcgacacgttgaaggaccgggtggcatgaaaggagaacagacagatatgttcgacatcctcgaccaggagctagagcgcgcctcgttgccagtctcggccgtgtaccacttccctgtcgagcgagaggtaggccttattcgcgagaccgctaggatactagagaagcggacaggatcagccgcggaccgcttttggcagatgacgtgccggcggctctacgctcgatatcaggtgaacgggatggccgagccgcagattaaggaagcacttgcgaccttcacctatgcggtgcacgccgaaatggcccgggcagcgtgggacgagtggaccggcgacaatccacgaggtgcggcatgatgcctggctcgcggaagatgcaaaagcagctggtcgagatggaagaagcccttcggcaatccaacgcgagagcgtcggctgcggagaaggcactagccgacaagaacctgctctactgctccttctgctcgaaggatcagcacagcgttcgcaagctgattgcgggacgcggggtcttcatctgcaacgagtgcgttctgctgtgcgtcgagatatgcttggaagcgaagccgcaataaggaacctgatattgcatcgatcggcagccaagcaagccaagaccctgtttgaggacgagaagcctcaagccgaccccggcttgtctccgatcctgatgcgtcgtgacgatatcgtcctgatgaagcgagcagtcgatctcactggcaaggatgagcgcacgctgcgcaagtggaacaagaaataccgggttggccggcagtccagcccgagcgcgccgatcgagttctcggcacctgccttgatcatgctcctccatggcgacatgtttgcgctcgaggagcttcgcaagggccaccgcacccacagccgagttgagcgatatttcgacttccttggcctcccggcggcagggaaggcgtagggtatgtgcatgacacacatccctctgaaatttcggaagccgtaaaagccttcagtcaccccacaatgctggcaccagcttgcgacgccagaaatcgccagtgccagcggttgcggaggggtcatgctgaacgacaaacaattctgcgtagtggtctcgtcagccgtggcactcgtggcgttcgtatgcctcatgcggttcctgcccgacgtgatggcctggacaggctggccgatgtgcgacaagggaacatgtaacgttcaaagctggcttggcgccttgagcggttggttcggcgggatagctgctttcggcaccatcgccttcgttgtgcttcaactccgagaacagcggctgcagaccgctttcactgtcggggatgctcagccgacaatggatgcaatcgagcatctaaacgatagctccgagctggtggtaaggattgtaaattggaaccgccgagggctcatcgttcgctccctcgatgtcgatgatacgaatacgattgtgctcaccaacaatctcaccgttgatggcaaagtggttgcgaccgatttcctgcaatttgggataaagcctttccatgtgcgcggctgggaagacagagggaaggccccgcattatgccgagatcaggcttgccgccatgcgcgaaatagagacggacctcagtttcgcaaaaaactggcgcgacatccgcaggatcacggccgatgtccaaatacttggtgattctcacaagatcacgcagctgagggctgacacgggcccaatcttgtcatgactacgtgaaatcgcgcaaacgcgcccgctcacgtcaaatcgctttagccactccgccgtggaattctccgtgtcagacaaacacaggagaaagcgatgcttccctcttccagcagacgccgcggcagagacccaatcgtcaacctcatgctcaacggcggccgggtaacggcgacgttccgtgaagcgctcttcgacgccacagcccgcgagggtctcagcgtcaatgagttttgcctgaaggcggcggccgagaagctgaaagcctcgggtcgcgaattttccggtgttttccacccaggcgattttgcggaggcttgctgaatgggattcctgagctcactgaccggcagtaacaccggcaaagcaacgattgcggcagccaatcagaacaaaggcctgattacagaccttcagggcaccggcaactcgatcatcaacaccggtgagcagaagtcggaaggggctctcaattcggccattggcgcctatcagccatgggtcgacaccggcaccgccgccaacacgatgtatgcgaacgccaacggcttgaacggggcagatggcaatgcagcggcagtgaaggccttccaagctggccccggctacgagtttgctgtcaacgagagcatgcgagctgcggagcgtgctgcttcagcagggggcagccttgctagcggcaatctcatcgccgccctccaggaccgtggcaacagcctcgcgaaccaagaatacggcggatggcttgaccgtctcaaggggacttctgacgcgggcctcacggcggcctcagggcaggccggccaatatgacgccatggccaacctctaccagaacacggccaatgaccgcctcgatcttgaaagcggtgtcactcagggactgctcggcgtcaacaatcagatcgcacagggcaaggaagccaaggtcgccgctcagggcagcttcctgaagggcctaatcaacggcggcgtcagccttgccactggcggcaaaacagcggggctcttctaatggctatcaaaagtcttctcgcaccgagcgtgtctattccccagcccgacaactcttggctcgacggcatagcacagtcgatcggcggcctgatccagaagaagggcaatgacaaggcgcttgcccggcttgctgacatcaccggcagctccatgcctgcacaggcgcaacagcctcagtcgtggctatccaagctcgtgggcgccgatcagccacagcaatccgccggagcacccatgacggccactgtgggcccagtcgatcgcggtccagcgcagggcagcacgtttcagccgtttatcgacaccatccgcacaaaggtcactaatccctatggcttggcagcggtcgcagcaactggccgtgccgaaagcggatggagcccgcagaacgctgctcgctcgtggtctgatcccagtcaatctggacaagctggtaccgccggcggcgtcatgtcctggcgcgccgagcggctgcagaacctgcaaaactatgcccggagcaaaggtgaggatggtaatggctcaccatccactcaggctgagttctttttgaacgaagacccgaacctcatcacgcggctcaactccgctcagtcgccggaagaggctgcgaacctcatggcaaacgcttggaagttcgcaggctacgatcaggcgggaggcgaagcagcgcgccgccgtgccatgaccacaaactattactcccaggatttccgcgacgctggcggctcccctcaggcccagccggacgcgcaagctgcagcaccggtggcaaacctgccgtctccggtgaaccacaccaacacccaaggtaacggcacacaggtggcgagccttgacccgtccatcggcattcctctgcctggctgggctggcccgatgagagcaaacgatcctgcgcgcagtctcgatgctgctgcagcgccagtggcaccgcagagcgtagccgccgcaggtggtgatgtgccggtagctgcctcacaggtcaactcgggctctccgcttccgcgtcccgctcagatggcgtcaagcaccggtaccatccttgctccgggggtaacacccgttcagcgaggcggcgttgacgtgggccttatccaaaccctgttgcgcgacccgcagctcaatcagatcggtctagatctctggaaggccaacgtgcaggggcagaaggcctccgagccctggcagttcatcactttgcccgatggcacccttgctcgcgccaaccagcagaccggcgaagtgatgtcgcttggcggcttcagcaagcctcaggatccgctcaaggtcggccctgacgacgtgctgctcgaccctgtgacccaccagccgatctacaagggctcgggtgagaagccgaccaacgatatccgagagtacaactacgctcaaagccagggcttcaagggcacgttcgctgactggcagacccagaataagaaggcgggcgcgaccgtcatcaacacgggcgacaacagcagcaagtttgccgaggagtccgacaaagcagcggcgaagcgcctcaatgacatcgtcgaggctggatcggcagtcccgcagatgatggatgaccttcaaacgctggcaacgctgggtgctcagattggcactggcaaaggtgcacaggcgctggctgcgcttggcccatacgccgaggcgcttggcatcaacatctctggccttggtgaagctcaggcttaccaggctgtgacagctcgcctgatccctcagatgcgcccgcccggttctggtccgcagaccgacgccgacgcacgtaacctgctgaacagcatcccgacgctcggaaagacgccagagggcaaccggctcatcatccagacgttccagcgtatccagcagaaccgcacgcaggcggccgagattgcctcacgggcgtacctgcctaaggatcagggtggcatcacttggcaggaagcggagaagcagatccgagcgctcgctaacccctactcggaattcaagcagttcgccaagggtaaccccgccacgaacgcgccggctacgcctcagacaagagcccctcgcgctcgcaatccacagaccggagagaccctcgaactccgcaacggcaaatgggagcccgtacgctaatggccgacaatcttcccgctcttccgcctggcttcgtgctcgataccggcgcggcgcccgctcccaggcccgcaaagggcgaaactggtgagcttatgggctatgcccccgcaggcggtgaaagcacccccgagctgcccccaggcttcgaaatggagcccgtggggcgccacctcaactgggaggaaagccagcgcctactcgatcgagaagagcagagcggcgcaagtggcgcattcggagcgttcacctccggtggcgttgaaggctttccgatcgttggtcctgctatcatgggcgggatcaagcgcgcggccgctggtctggggtcgctgatcaacggcgacagttacgattccaaccttgagcgcgccgatcagatggtgacggatgctcaagagcagcacccagtcgcccgcatcgctggcaacatcacaggtggcgtcacggccatggcgcctgtcgcaagcactgcattgggcgcccgtgctttgggtgtgacgggtgagacgcttgccgggcgcacgctggcgagcacgctctcaggagcagcgataggtacggcagacggcgcggcacgttctggaggcgaccttgaagcaaccggctatgggttggcgagcggggcggggtttggggtcgtaggtcctgctctcggctccgcgattggtgccggcgctcggggcgtcctgaactgggttcgcagtagaggtgacagcgtgggccgcaacctcgcgacatcgttggccgccgacggtttcgacgaggcagcagctcgagcccgcctttcggatctgggtcccgagggcatggtggccgatctaggtccgaatatgcagggtgaccttagcgccatcgcttcgatgcctggccgtgggcagacagttgctcgctctgcactcgacgagcgcgcagcaggcgcaggccggcgcatccggacggacgcggatgcgtcgctcggcccgagtggcgatatcatcgcggatcgaacggcctacgttgagcagcgtgcgcaggcagcgagcccgctttacaaggctgcgtatgccgagccctatcaggcaacgactgcaatcaagaacgtgatcaagacgccggccggcaagcgcgcctttgctcaagccgaggagtgggcagctaacgagcagttgccgatcaacgccgacgccctcgatgttcgcggtgtggatctcgtcaagcgcgccctcgatgatcaaatcagcgttgctcagaaggcgggccgcaacaacgaagtgcgcatgctcacgacgatgaaaaaccagatcatcaaggatgccccgcagtcctaccgcgatgccctagatgccttctccggtccgtcagctgtcatcgatgctctcgacaacggccgatcggtgtttcagcgcagcgtgcaccctggcgaggttgcgcaagagatgaaggggctgaaccccagcgaacgagacgcctatctgcagggcgcccgtgctggcctggacgaaatcatgatgaatgcccgcaacgatggtggcgccgctcgggcaatgttccagaaggacgccaatcgcttcaagctgcgcactcttctcggtcgcgatgaagccgaccgcttcctttcagcgatcgagcgggaggcaaccttcgctgacacgggccatgcggtgacgggtaacagtgtcacggctgcccgtacagcggcgcagcagcgatggggaggtcagcggggaggcggcaacggcgtcatgcgcggcgtgctcaacatgaactttggcgatgccctagcctctgcaggcgggaagctcaaccaggttcagaacgaagcggccatggcggctcgtcgaggaagggctgctgacatccttacggcccgcggtcctgctgctgctgatcagctcgaaaggctttcgttcctgcagacccttcaaggccagaacgctcagattggcgcgggagcgggcacagccgcccagatcggcgcccaggctgcccccacgttcatgcgtcagcttttggagcggcgttgagcatcgcgtctgtcgacaagggtcacgatgtacatgatggagacccctatgaggatgcctacacctaggccccaggcgaaatcgcccgtggtcatcccgatcgcccaacggattgcgaaccacactccgagcatggcagcgcagcagatgacaacataggcgaggcggtagacgatatcggtcatgccggcacaatgcctcaacctctcaaggatgtgaagatgtcagaacaccaagcaccgatcgtcgagcagatggacaccaacaccatcacgggcttgctccacttcatcgccattcaggcgcaaacgggcgacgagcagcagaaggttgaggccggcaaggtgctcgggcaggtaatctccggccttcctgacgccgccacggtgacgctcgacgatgccctcaccattcaggcccttgccatctcgctcggccataccatccgggagagcgccgatgaccaagccaaggtgctggatctcgtctcgcacatgcttttcgccgtctgggcagtcgcaagggtgttggagaacctcacagggggcagtgtgaacgatcgacgcttcttcgagcaccagccggcaaacacctctgtgcaatgaagggcagggcgatggttaaacaaacctcagaaaaccggatgtcggtcctggccaatgcgaggcacgaagcgttcgcccaggcagtagcaagcggtatgagcgcgaccgaagcttatgccgccgcagggttcaagccacatcagcagaacgcttcgaggctgatgttaaatgatgtggttcgggcccgtgtggccgatatacaggcgctgggcgtcgagagggcgcttgtgagcatagagagcctcaccgacgagcttgaggcagcgcgagtgcaggctatggcctccgggcgctatgccgctgctgtgagcgcaatacttggcaaggcgaagcttcacaacctcctcaagggcgacagcaccacggcacagaccacaggcctgttcaccttcgatggatcgatgctcgatgatctgaccgatgatgaaatggatctgcttgagcgggtggcactgcgcatcgggctaatggtgcagacggaccagtcgaaactgaggaaagtgcactgacggactggctcctcgcgttctcttttggtaaacgtcttttcacaagtcgttcgctgagagtgaacatgcttcaagccgtcaatccttcccgagttccggttctcttttcgatcctcgctgagtttggccttcgatctctaccgaccaaccagcgttgtggcccacgcgacactcacgccggacgcacgctcgacggtctcctcgatcgccatggcgaagcgcacctaactgtcgtcctgcggtgcgtgctctcctcaaaatcccccgaccttgccagcgataccttcggcgcagtgtctgatgtgctgctatttcgcccacagatgccccaggacgcgcttcagcaggctttcgcgaccatcgacctagctgagcagagaaggcgcgctgtgcgccttcgcccttggcctgtccggcaaactctccgagccatgcttgattccatcatcgagaaaggtgagccctcccatgtctgaagccatcgtccgagcaatctgcgaagagttcgacgtgaaaatcatcaacgcttgccagttccccaagccgggagagacgcgcgccgtggccacgctcttagccatccttgagaagtacggagaaggtcacctccggcttgtcgtctcgacactgatggagactaagggcaatcaagggctaatgacggcgccgatcctctgggcgacgtcggaccttgtcgaggcctgctcagagtggatcgagaaggatctgagcgactggtatcaggcatgggacaagatccccctcggctggatcacctggcactgccaatcgctctacggcatcgtgactgtaaggcaggcagcggccggcgccatgtatctgatgctgcggatctacaccaagcacagcgccgatcgggaagtggatttcagcttcatcagaaagaccggcgacgttgaggaccaaggcgcgttgaggcaggtaccggctgaaacggcaatcgaggccggcaagacgctgctcgcagtcaaggagaagctctcaccgcgggagttccgagcatggcttcgagagacggccggcatgacgcgccatgctgccgatcgttacatgcggaaggcagccgagggtgaaacgccggtctgcacgaagcgcaccggcaaggagacggccgatatcggcatggagtgcctcaagatgaaggcgacgcttccccagggcgagttcaagccatggctgcgcgaacagtgcccggtggcagtgacgacagccaacagctacatgcagatcgcgagactatggggcgacgacgagcgcatgcttgagatggtccaagcgactggcctgcttatcctcgcgcagaacaagacccctgcagccgtccgggagaaggtcgctgccctcgtggcaaagggtagctttgttacgcgcgagaagatcgaggatctgatgaagccggcgaacaccaaccagcagccgcagctcgggcttgcggcataggggaggcacatgaccattcttcgatctaaccgtaagtgtctccgcgagtaccttgtgagcgcagacgaagccgcccgcttcctcaaggtgacgggctttcgcttccgccaactcgtggctgatggctttaccggcaaatcgaaagggcttctatcggttgggcgcagtgctcgacggccacattcggtacctgcgcgagccagttttctgcagaaatgcgcagaacgaagcggcctaggtggaaatttatcgcctcaattgagattagaattcagggcgatgaccttttgaatgacggcacacgcccttcctccgtctttacacaaaaattccaaatcgcatataagctcggtatacatggtgaccgatttgcgtcggacgcttgtgtaaggccgatagtggccgccacggagaaagctttaggtcaatggcctacgtcccacatatccctgactggtttctgacccgcaaagcagcgcaggtgacagctttcttcagcctcaaggctggcggtgccattaatattctcaaggcaacgaagctgatctatctcgccgatcgacttagcatcgagaaacgggatttcccgataacgaacgacagctacgtgtccatgaggttcggcccggtcaactcgtatacctacagttacatgacgggcgttgctcccacgcgacaagaagactggcatgagtttatctctcctcgccacagagacgaactgccattgtcgcaacagattgagctcgatgacctagacgagctcagtcgtgctgacctcaaggttctggaggagacatgggagaagttcaaagacatcgatcgctttgaacttgcggagtggacccatgattactgcccggaatggaaggaccccgcaggctcgtcaattccgattgagctggctaggattttccaggtgctcgacaagccagaccctgtcgaccttgctgaggatctgcaaaacgagcgtcgcatagtggcggcctttcgagctgcatgaccgaatacgttccctaccccgcagcatcctttctcgggccgatcaatgaagttcatcacctgttcgcagtgatgaattccccctgcgccgctaagcagtgtctgatcatcaacgtgacttcgatcaagggtgggaagaactacgatccggcgtgcgtccttgaggctggagagcaccctttccttaagcaccctagctatgtgttattccgcatggcgcagattacgcgcgcaggtcacatcgggaatatggtcgacaagaattactatctcgctcgcgaggattggggcgatgctgttttcaagcggatcctcgccggcattcgcgattcagaggaaacatccggccgtatcattcgatacgctaacgagaacggcatcggataaagctcggaaccgtcatcgggctacgccccgtgtccaagccgctggcctcatcacccccctcgggccttccgattaaacgactcaaccgcgtcgttgtactcagacagcgcatcctgattatcgctctgggccttctgtagggcctcttccgcctcgttgttgttgcaccgcaggaactgctcaacgtcatccttgtaggattccatctcgcgtttgcaccggtcaaactcccactcatcgtcaaagctaccgtagttgcttgcgcatgaggggctactgggctccgagcagtaggagaacgctctcgacgtaggagccaacacgagcagcaccgcgagacctgctcttttgaggttgacttgcaccatcaccatcctccgggtctggacatggcgctccggttaccgcagcgggttccatcggccgcgatgtcattcggcgaatagcagtttcctgggtagcgccgaggctggtagtagcttccaccaccacagttgttgttcgcgcataccgcgacggccgtgccgaccacagcgatagccacaagagccgccgcggcctgctgttgttggacaaccatctgctggcattccagcatgttcatgccacggcggttcacctccgataccagttggaactggaaggcgggatctgtcgtctccaacgctgtcttgcatagcgctgccttgctcacggcggacggcttcttggcaaactctgccggcgttgtcgtacagctcgccagtgcgagcgtcatcatcacggcgccagtgcgccgagcccaaattcttgcaatcacggtctaacccctcagttgcccgaggcgacaatcgcagaattttatgccacgtcaaattgcatgatgagtcatcgttaatgcagccacgggctgcgtttggctcttgctggcctcttgcgcagcaaccgctgtggctatcgcttgaagcataatcgccaggcccgttaacagggctgcccaagcgttcgccttagagacgcgagaagtacgaattacaaggacattcccctcttcgatctcgtaggcaaaatcaccgtcgccaccgatgggctccaacgattttgttgtgctctgagcaaaaaaagtctgagcggacagccaccacagagcggcactgatcaatcccgccgccacgcttccccattgcaacactgccaacatccttcgacctttcatattcactgtgagatgaccacccgctgtgggcaacgatttgcccgaggagccgcggtgctgcgccccgcaacgctgagcggcgccggtacggtcccttagagactgtcggctggctcgcgcacgacagacagcgagcagtgacgcatcgtcattcggcatcaccttcagggtttagcaagcgattatcgtggctgagatgcgccgctataagcccgagtgcgaggagtgtagtgtgcagaaatgcctcgcacagttcttcaaatagatcgagcgggatatgcaggcttgccggccccagcaccaaatcaatcgagagcgagccatcgtccatggtgacgctgttttcatgatcgagagcatggtggatgtgcatgccagataggtgtaccaatccggaggtccgatcatagacctgctggatccaagtgtgttgcttggcgagagatgtcagcaacacgctgtcgcgcagcttgtcgccgctcttgggtatgatcttgtcgtagcggcctcccgcaattaggtggctcactccctcatgcgggttcttcatcagcttaatgccgttcaccctcatcgcggtgtcaatctgcatccttaggatggcgcccgcagctggatagtttcgggcctcgatcaaaactttgagcgcctgggcgttcgactcgaccctctgctgggcgccaagcagaaagagcgtgaccatgctgaaccgcattcctctgattgagagtgcggctttctctttgctttctgctacggcaatgccgatgtcgtcgagtagctgatcaacatttccggcttgaggtgaggccgacatgcttcagccacccgcgccgggaggagcatcgttgttcatgaactccggatactgaacgacttcgctctccatcgtgtcgacggacttttgcgtcgtgcgggcaagccttacacctggaccgccggcaaccatttcgccgtctgcttggaatatcacgccagcttgttcgatcgcccgttgcactgcttggacgttgcccgctgagctccgttcagtgccgactgtctccatgcgcttgatagtttgcacagagagacccgtggccttcgccaagtcctcttgcttcaagccaacaagggctcttcctgccttcaactgatcagcggtaatcatgcccagctccgtatatgtcacttttcgtataatttgtgtaccgtagagattgacactctgcaatacgttcattatacctaacgtacaacatagttaatcgcaagggacatcaccgatgccgaacaccattgttccggccaccgccgaaggcatgcccaaattcgaccgagcccgcattatgcagctggcatggaagcttttccgcaagcagtggaatggcagccgcccggccaatgagaccagccgtcgcaagtcgttctctcgctgcctcaagtccgcatggatgacgatcaagtgggaagccgccgaggcactcaagaccatccagcagcgtgcggccgatcgagtgaatgaactggccgccgagctgatgcgcgtgaatgctcgtccttggcggatgcgggtggaaagcgatcggctcgccctccaagccgagatttcaagactgcaggcaacagcgcgcctctaagggctgaaccatatcaatcaatatcaatggagactgaccatgcagaacgtccgcgttcctgtccacggcgaagctttgcccgccaaccggtacttcgaccatcacccgtctatcctgcctgacatgtacacaatgacctgtgagggcgtgtgcatggagccgcttattccggacggttcaaagctgcttttcagccgtgtcgagccttacaagtccggcgacctggtgctcatcttcaagaagcgggaacgcacgctgccgggtgaccatcagatggtggtgaagcggctcttctgggcgccgccgattgaatactggaacgagccagagaagtggccgtacggcgcggggtccatggtcatcgctgaaatgctcaaccccgccaagcgtctggctttcgatgctgatggccttctcggcatccacaagtgcctcggccccgtccccaagggtcacaagacctacaaggtcgatgacgcgtggatcagagagcaagcccgtttccgaggtctgtaggcaactcaagcaacccaacaccgcaacgaggaatatcgaaatggaaaacccgattcagtcggccggcgaagctgtgaccgaaacccccgtgaagaaagtgaaccgtctcggttgggagctggcccatgcactcgacgagtacgccgatggagactggaaggcagtggtttatccgacgtcggttaggccgacgttcgccgttggcttctgctacatggaccttccggacgcaaaggatccgttcgaggatgccattaacgcctaccgcgaaggcatggcccggatggacgcctttcccgatggaactatcacagcccagaacgaagaccggctcatcgcggaaacgtatggtccaccgctcgaggtgctcttgaactggaaggaaccagctcttctcacccgtcgcggtgcaatcaccactctgaaattcatcgccgacaagacggtgttcgtcgacgaactgcgcgacgtgatggttgaagctgtcctaaggtacctcgaacgccaggaaggagtgctgtgatggaaacgacccgtagacgcttccttggtggccttgccgtcgcctccgccctcacaggcgcaacagcggccgcagcggtcagcacagcgactggcgaggatccatcgctcctcaagctcggtaccgccttcgaggccgcgcaggagaggtttctggccgcatccgatcgtgtggccgccctacagcccgtctaccactcgcaggcgccgcagacgcccgacgagttggtggcgcgccgcggctcctacgcttggcagatgggtttcacagactggatgtgcgatccagatgatccgaactatgggcgcatgaaggacgagaggggcaatgtccttgagatggtcagagcctaccggatcgaagcgcagtatggcgccagcttcgacattcgcgacccgaagctcgcagatttcaccgacgcgagcgaaatcgacctacggcttcaccagatcgccacggactatgaaagggcgacagaagcggctctcgcttcgtcagggctcggcctggcgatcgatgagtatcgcgaagcgcagtacgcactacgctccatcatccatgaactgtgcgccatccgtgcgaagacgttaaccggcgtaggcctcaaggtgcgtgccacagcagctttcgcgtctttcggttccgatgagcgcttcactgccacccagctgcttgcacgagctgtctgggaagatatgggggaggaagcctgatgaacgcgcacattcgcatacaggccatgcgcaggcacgcgctcgaggctaagattgaggagatgatagctctcctcgacctgctcgacggcgacccagaccttgaggacgggggagacacggagccctctctgggtgacgctgggctcatcaccgaaagtggcatcgagtgcgacctcgaaagggacacgtcggacgccgagccggcaggagacgagggcgacttcagcgccaagtttttcggaggggccggcctatgagcgttcacagcttcccgctcgatcggcaaggctcccaggtccagcgctgcgcctcggccctgcagcggctccacggtgagcttgccaacgtctactggcgcaaggagatgcaggcgcttgctgcccgtctcaaaggcctaggcttgcccgaggacgaggtttcgcgccaggtcagggcattcactacggcggtgcagatcgagctccagaggctatttgcagcggccgttgagcatggtgaggagggggtgggttaaaatccgattggctcgctcgatcaaggcgatgggcgatctaaagtagaccctgagtagctggtggccagcatctcggatgagcgcaaatgagcgcgcccacgagagcctaaaataggcctgaataggtcctgcggcgtcggcgggagtttccgcagcaagtacgcgcacgcgagagccctcgattttctgcgcagtatgcacgcgcggatgaggcaatgaatgtcaacaaaagtgaacatcggagggaaggacgctttgaaaaacaatcaaaggaaatcagagccgctctcggcttgaaggtattgccatgatggcaacccccttggaaatttcgcgaccagtacgcgcacgcgcgcgaggcgagacctgacaaaacctgacatcgagacagtcattgtgaatttccggagcaagtacgcgcgcgcacgcgaggccggcttgcgagcgctacggcatgacgacaaatgacgacatgtgaggccatttcgggaccagtacgcgcgtgcgcgcgagggcctgggcttaactggccggcatcagcggaagctacgagatgccacgtctgggatcagcggcggagaatagcgtccgatcgaaaccagatactccgcaatctccgagatcaggtgttgcctggagccatagcgttcatcgatctcaagcagcttaggcgccaccgcctcataagcctctgctgacagatccgcgtcaccgaacaggtagccggttcctcccatcaccgcgacgatatcgcagcccgtgtcggcaacctcctgaacgaagctgggaatctggtcgggtgtcatcgttttcatggatctctccgaggcacgagcagctgtcgctaacaatgccgcccgcgcagcattaaggctagtcgcagatctgctagcaaatcggatttaacaaaatgattcatcgatcaccggcaagtcgttgttttgactcggaacgaatcacttcggcgtcagttgattcgccatcaacatcagccgaggtagcgcgttatggccagctttacccttaccccgatcgagccgctcgaagtcgaaatccgcggtgtcggccagtatgctcccgccgagaccgtcgaggagatgattggacttctcacatcggaatggccggacaagacgaagccgggatttcacagcgcgctcgcaaggtcgatcgatgccatggtgatggcggctgagcccgctgcagcccgcgccgcctttgtcgatgctgcccacgctgccggcatgcacatccttcctgacgacatggccgagatcaggaaggctagctgatcgccatggccagagttaagctctacagtggcttcagcagcaccaacctgttgccaggcagatcgatgacgccctcatctttcagggagtagagaacgttgactatgctgtcctggctgatgccctggccgacgagcggcggcccgatctcgtagaggctgagcggaacgccgggttcaagcctaagttctttgagcagctcgatgagctttgctttggtgctgtcgccttcgttcatgactgcatcccttaaaacgatgggtatctcatgtaatggtacttcaccgccttcaagtccttgaagccctgttcggtcagccagacctcattccgccgctcggggtgctgctcatcatacgtcacgccgatatagcctcgagctagaagcttggcctgagtgccggggccgaagttcttgatctccctccagtgagcgcggacattcacccccagcttgccgaggtgctccataacggcggcttctctccagtcgaactgttccaccttcggcgcgggtggtacattcgggtcacgtcgagccaatatctcatcaacgcgattgacccgagtctcctcgtcctcccagttctcttttccgtctggcttgaggtaggagaccggtactgccaccggttgatgctttggcagcggaatgatggtgcagaccagtgtgcgaatatcgacgttgacgacggcgccggcattgcgagccgcgcggatgaggcgctctatgtcggcttggcgaaacgaggctcgggccaatgtcctctaagcctccgcttgcagctgctgccaggcctttaagccttcgtcggtcagcacgtagtgagacagccgcgtcgcgtcatcgggtgcagagtggatttcgatgaaaccgcgcgccttcagacggtcaccggtatcaggcccgcagttcttgatcgcggcggcaggtatcggatggttaggggcgtgctcggccagctggctcaaagctactcgttcacgcttcccgagtggagttcccacaagagccgccgcccattttgcatgattctcttccatgagccgcttcatatcgtcttgtcccatagtgcggggatcaaagccgagctggtcgtaccattgccttaccggattgtctttgtcgtcgacgatcggataaccgccggcgcccctggtcggctctggctgcctaagctccacgtccgcccacgaggatccgctttcccgttccacctgccaggagtgcttgatgctctctaaggccggctcgttaggatcgagtgacaccagccactcgtccagtcgctggcgtagataacgctcaccccgcgatgagccggtgaaggagatgggcttgatggggcagatcttgccgaaagtctctgtcgacagcccgcagtaggctgcggcaagctttctgttcaaggcggcgggccaataagggagtttttccgtgtccatcgctagtcccgtgaaaacaccggtccagcatgttgcattccatgtcgcgtggatttgccgtgcatcgttggaaaccgctggaaaccatggagactagcttgcaacatgacgcaacaaaaaatcaactgagatgttgcgcgcccagcgaggtaatccgttgatttcgttggtgaaagtgattggctggggaacctggactcgaaccaagattaacggagtcagagtccgtcgttctaccattgaactattccccagcagtcgctgccgaagcgtgcttggctgctgtgcggcgcttataaccaaatcatcgcggaatgcaaatagctgtttgaaaaaaatttgaacggccttgtggagtgttggaaaaggccgattcttgagggttgggaaaaagaatttgtcgttttggccgagcgctggtatcttcgcgccaacgcaaaatcgaatgagcgccagcagcatacctcaaggagttcatcctttgggacttgcgcggcgcggtggaaaaacaacgtggaagaccccgaaggcggctttaagccgcaatctgacggggcgtcggcggcagcgcgcaaggatggcaagaaatccaggcgccgcaagggcaagcgtggcgggcaatcccgcaatgcagctcaggccgcttcgcatgccccctccggcatcgccggcgaggcagcgcgcccaatggatgcacgtccaacggacattgcggccgagacatcggcccgcaagcgcaagcgccgccggcgcggctccggcgcgtcgggcgagggtgctccaagacagcagcaacatggtgaacaggcagcatccgccaatcgcgcgggtgcgcatgatgatgatgcggcttcgggcaagcgtggccgtcgcaagcatcgcggcaagcgcggcctgcagggccggccgctggcgcaggcaaagccgtcgggccatcagccggcgcagcagcctgcaaatcagcccaatgtcggccgtggtcccgcgcaggaagcgcgtggcgaaaacgacaatcgcgtccagcgtcaccaggagcgcggcgaacggccggcctccgcccacccctggccggatgagctttacgcagcactcgacctcggcaccaacaattgccgcctcctgatcgcgcagccgacccgtccgggccagttccgcgtcgtcgatgccttctcgcgcatcgtgcgcctcggcgaggggctggcggcgagtgggcgtctgtccgacgatgccatggaccgcgccgtcgacgcgctgcgcgtctgcgccggcaagctgaagaaccgcgagatccgccgcatgcgactgatcgccaccgaggcctgccgacaggcaagcaacggcgaggaattcctcaagcgtgtcgtcgccgagacggggctcgagcttgagatcatcgatcgcgagaccgaggcgcggctcgccgtctccggctgctcctcgctggtcggccgcgaaacgcgctccgtcgtactcttcgatatcggcggcggctcgtcggagatcgccgtcatccacatcggcgacagccgcttcagccggcttgccaatcacatcacccactggacctcgcttcccgtcggcgtcgtgacattgtccgagcgccatggcggccgcgatgtcacgcccgatgtcttcgaaggcatggtgctggaagtccagggcatgctctcgcatttcgattgccccgtcatcgacggaaatctcggcgattttcaccttatcggcacctcgggcacggtcaccacgcttgccggcgtccatctcgatctgccgcgctacgaccggcgcaaggtcgatggcatctggctgtccgacgacgaggtctcggccatgcaggccaagcttctgtcgtgggatttcgccagccgcgccgccaatccctgcatcgggccggatcgcgccgatctggtgctggcgggctgcgccattctcgaggccattcgtcgccgctggccgagcccgcgcatgcgcgttgccgatcgtggcttgagggaaggccttctcaccgacatgatggcggatgacggcgtctggcggcgccatcgccaccgccgcggccaacgcggcaaataggggatcagctatgaccaagccaaccattgcgggcaaccgcaccggccgcaagctcggccagcgcgtcaagaacaagaagatgaaggcgtcctcgcgccagtggctgcagcgccatatcaacgatccctatgtgcagcgcgcccagctcgagggctaccgcgcccgcgccgccttcaagctcttggagatcgacgagaagcacggcatcctcaagggcgcgcgccgcatcatcgatctgggggccgcgcccggcagctggtcgcagatcgccgccaaggtcaccggctcgacggatgaggacgtgcgcgtcgcggccatcgacttcctggagatggcgcagcttcccggcgtcaggatcctgcagctcgacttcctggatccgacggcgcccgaccagctgatggaagccgtcggcggcacgcccgatctcgtcgtctccgacatggcggcgccgaccacgggccaccacagaacggaccacctgcgcaccatgcatctgtgcgaagtggccgcgcatttcgccatcgaggtgctgggcgagggcggccacttcctggccaagaccttccagggcggcacggaaaaggacctgctcaatctgctgaagcagaatttcaagcaggtcgtccacgtcaagccggcatcgtcgcgcgccgaatcggtcgaaatgttcctgcttgccaagggcttcaagggccgcaaagctgaggccgacgaaacggaggcttgatcttgaggtccttccgggtggagtatgacagttagaagactgtcccaagaccggaatgaccgcggatatcgatgctgctttacgtcaccctcggaaccaacgatatcgatcaggcccggcacttctatgatgtcgtgctgcccgtgctgggctaccggcgccagcgctactcggaagaggagatcggctatgccgccgatggcgatatccgctgccggctctggatcgtcacccccttcaaccgccgccgcgcctcgaatggcaatggcggcatggtggcgctcgcggccgaaaccagggctgacgtcgatgccttctatcgcgcggcgatatcagccggcggtgtcagcgagggcgaaccgggcctgcgccccttccacgccaatttccatgcggcttacgtgcgcgatcccgacggcaacaagctgagcgccgtctgcgaggcgccggagccggcagccgaataagcgcgcagcctcacttcacggcctgctgttccgcttccagcacgcttgccgcgatcggcttggcgcgatggccggaaaccagcgcgccggcatgcttgtccatgcggatgaaggggatcgttgccagtacggtcaatagcgcgatcacgtagaaggcgacgtggaaatcctccacctgcagcgcttcgccgcgaatgaagatcgaggtctccaggatcgccgcggccacggccacgccgagcgccaggctgatctgctgcatgaccgagctcatcgaggtcgcctggctcgcctgcgcgtcgtcgatatcggcataggcaagcgcgttgacgccggtaaagaagaaggaacgcgagaaaccgccgatcagaagcacgagaatgatgacgagatgcggcgtcgtcggcgtgaagaagccggtaaccacggtgaccacagttgtcacgcccgccgccgtcaacagcgtggtgcggaagcccaccgccgcgaacacccgcctggccaagaatttcgtggtgatcgcgccgatcgcgccggcgaatgtgatcaggccggattggaacggcgtcagcccgaagccgagctgcagcatcagcggcgtcaaaaacggcatggcgccgatgcagatgcgaaacagcgttccccccgttgtcgacgcccggaaggtcgggttcttgaagagttgcagattgaggatcggcgctgggtgccgcttggcatggcgcacatagagcacgccgcagacgacgccgattgcggtcgcggcgatgccgatgatcggcggcagggccggcaggctgacgacggagaggccgaagaccacgccggccgccgcgaacgaggtgagcacgaagccggtgacgtcgagcttcggcggcgcggtcgcctccacctcgggcaggaagatcgtcgccagccagacgccgatgatgccgacgggcacgttgatcaggaagatccagtgccaggtgaaataggtggtgatgaagccgccgagcggcggcccggccagcggcccgaccagcgccggaatggtcagcagcgccatggccgagacgaggtcgctgcgcttggtcgtgcgcaagagcaccaggcggccgaccggcgtcatcatcgccccgcccatgccctgcaggaagcgggcggcgacgaattcgatcaggcccgacgaaatcgcgcagaggatcgagccgacgacgaagacgcagatggcgaggcgaaagatgcgcttggcgccgaaccggtccgccatccagccgctgaccggaatgaacaccgccagcgccaccatgtaggaggtcaacgccagcttcagcgtgatcggcccgacattgaggtcgttggcgatcgccggcagcgcggtcgaaatgacggtggaatccatctgctccatgaagagcgcgacggcaaggatcaggggaacgatgcggttcatgcgcgaatgccttgggggtcttgcgaaggcgctttgaaagccattgctctttagtcctcgcgccggcatctgccaagtgcgcaatcatcttagcaaatgcgaatgcatcacgtctgcgtgagaccgcaggttcggggatttcaacggccagaattgacatatgttcgtttcggcggattgcgataaacggtggtccgccatgacgacgggggcagcgtggcgatgcgccgcgcgttatcggaaggatgggatatggcgatttcgttggggatgaacaggcgcgctttcgtagcggcgggcgttggcatgctggccgcgccgatgattttgaaagagacggccgtaatggccgcaagcggagacaacaccaagatggatgcgacgacgcagccccagttcaatcagttcaagctcggctccttcaagttcaccgtcgtgaaggacggtggcgttgttggcgaaaagccgaatgaaaccttcggcacagaccagacgccggagaccgttcaggcgctgctggccaggaacttcctgccatcggacaagttcgtcaacaccttcgcgcccttcgtggtcgataccggctccgacgtgatccttgttgataccggcttcggtgaaggcggccgcgccaagggcaacggccagctcgccgccggcctcaaggccgccggctattcgaccgacgacatcaccgtggtggcgctcacccacatgcacggcgatcatatcggcggactgatggaaggcggcaagccggccttcgccaaggcccgctacgtcgccggcaaggccgaatacgatttctggaccgacaaggcccgtcagggaacccctgccgaaggcggccacaaggcggttctcgccaatgtcgtgccgctggccgaaaagatgaccttcatcggcgaaggcgacacggtcgcatccggcatcaccgcgatgctggcgacagggcacacgccgggccacatgatcttcaacatcgagtcggatggaaagcgcctgatcgccaccggcgataccgccaaccactatatcctgtcgctgcagaacccgacctgggaagtccgcttcgacatggacaaggcccaggccgccgccacccgcaagaaggtgttcgacatgatcgcgaccgacaaggtgcccttcctcggttaccacatgccgttcccatcggttggctacgccgaggtttacgaaagcggctaccgcttcgttcccaagacctaccagttcgacctctgatcctgctgcatggcagacataccaagcccggccaccgcgccgggcttatcttgtttttggcgtgcgtttctctgcgggaaagcgcgccagtctctctccaccctcattcctgtgctcgtcacaggaatccagccgacgcgcgtcggcgcggcgagaagagtctattgcgctcaaggacttgagcgcgctggatccctgtgacgagcacagggatgaggatgcggggagggcagcgcggaaccttagccgacgtgctttcggcgcaagagagcacatgccggttgctctctcgtctcgctcacgccacccgcggccggccacgttttttactattcccttgacgccatagacgtggtaccagccctcgccaacttccaaagcaaccttacacatcgccggtgcggataagtcgttccgggtgagggtgcatttttcttttataaggaattggccatggctcgcatcattgaaacgccgaccggtttagacgcactcaccttcgatgacgtgctgctgcagcctggtcattccgatgtccttcctggccagaccagcgtcgcgacccgcatcgccaccgatttcgagctcaacatcccgatcatctcgtccgccatggacacggtcaccgaaagccggctggcgatcgccatggcgcaggcaggcggcctcggcgtcattcacaagaacctgacgcccgtcgaacaggccgagcaggtccgccaggtcaagaagttcgaaagcggcatggtcgtcaaccctgtcaccatcggcccggacgccacgcttgccgatgcgctggcgctgatgaagatccacagcatctccggcatccccgtcgtcgagaagtccggccgcctcgtcggcatcctgacgaaccgcgacgtccgcttcgcctccgatccggcccagaagatctatgagctgatgacccgcgagggcctcgtcaccgtcaaggaaaccgtcgaccagcaggaagccaagcgtctgctgcacgcccaccgcatcgaaaagctgcttgtcgttgatggcgaaggccgttgcgtcggtctcatcaccgtcaaggatatcgagaagtcgcagctcaacccgaacgcctccaaggacgcgcagggccgccttcgcgccgctgccgccgttggcgttggtgacgatggcttcgagcgcgccgagcgcctgatcgaggctggcgtcgacctgctcgtcgtcgataccgcccatggccattcgcagggcgtgctgaacgccgtcgcgcgcgtcaagaagctctccaactccgtccgcgtcatggccggcaacgtcgccacttcggatggcaccaaggcgctgatcgatgccggcgcggatgccgtcaaggtcggtatcggtccgggctcgatctgcaccacccgcatcgtcgccggcgtcggcgttccgcagctcgccgccatcatgtcggcggtcgaagcggcccgcgcccaggacatccccgtcatcgccgatggcggcatcaagttctccggcgacgtcgccaaggcgatcgcgtcgggcgcatcggccgtcatgatcggctcgctgctcgccggcaccgatgaaagcccgggcgaagtctacctctaccagggccgctccttcaaagcctatcgcggcatgggctccgtcggcgccatggcccgcggctcggcggaccgctacttccaggcggaagtgcgcgacaccctcaagctcgttcccgagggcattgaaggtcaggttccctacaagggcccggtctccggcgttctgcaccagctggccggcggtctgaaagccgccatgggctacgtcggcggcaaggacctcaaggacttccaggagcgcgccaccttcgttcgcatctccggtgccggcctgcgcgaaagccatccgcatgacgtgaccatcacccgcgaaagcccgaactatccgggttccggcgcctgatgaaagacgcgagcagccgcattccgaccatcgtcgtcgcgctgctcgcggccatcgtgctgggcgtccttgtctggatggtgctcggctacgtcctgccgtttcaggacatgacgcgcgccgccatgctcgaagcgcggctgggcccctatgatgcgagcgatatcgacgccatgcgcggtttgctcgagcgaaagccggaagcacgcgacgtgctcgtcgccatgcatcgcgggcccgatctggtcctgcccttcgtgctgacggccctgctgtttgctattgtcaccaggctccgccccgccggccgctacttcaaccgcccgatgcatccggtcatgatagccgcgatctacgcgctgcccttcgtctacggcttttccgactacgccgagaacatcttgaccgacaacatcttttccggcggttccgaatggagcttcgccgcaaagctgttgccctgggcctcgagcatcaagttcgcgagcctgaccgtctgcgtcatcgtcctcctgcgcttcctggtctaccgcctggcgccgcctgccgatcacgcgggatcttagagcctcagcgcggccatcgccatggcggattggaaagcttcgccgccacgaaatccgccagcacctccaccttcaccggccgtgtcctcgccgaaggcgtcacaaagtaaagcgcgcccttcggcaggctccaatccggcagcagcgccttcagccgcccgtcggccatatattcgctggccatgaactccggcagttcgcagatcccgagccccgccagggccatcggcaccagcgcctcggaattggtcacgcgcaacggcccgccgggtgtcaccacatattcctcgccagtcttgctggtcagccgccagatgtcctggcgcggccgataggcatagccgaggcaatgatgcgccggaagctcgcgtggatgctgcggcgtgccgtgttgcgcgagatagtcgggcgaggcgagaatgaacggcgagacaggcgccagccgccgcgccaccagcgaggaatcaggcagcaccgcgatcctgagcgccgcgtcgaagccgtcggcgaccagatcgacgacggcgtcgctcatatgcaggtcgacgctgatgtcgggatagagcttgaagaactccggcaggatcggcgcgatccagtgcacgccgaaggtcatcggcgtcgccaaccggatcaagccgcgcgggcggctggacaattcccgcgccgcgttctcgatatcctcggcgtcgcagtagatgcgcgaggcgcggtcggcgagcttcaggccgaattcggtcagcgcgagctgccgcgatgtccggttgaacaagcgggcaccgaagcgctcctcgagccgcgccacgccgcgcgacaccgtgggaacggaaacgccgagcgccttggccgcccgcgcgaaggaacgctcttccgccaccttggcgaacattgccagaccctcgaaatcgggcagtttcattgtttcattcctgcaatgatagttttcattcatttctatttcgaaaagttcgcgccgtccatatgttctggtcatcgaacaacaggacaacacggacatgactgacacactgaattccgcccagagactgaacggcaaggtcgccgtcatcaccggcgccacatcgggcattggccttgccaccgcaaagcgtttcgccgccgagggtgcgcgcctcttcatcaccggccgccgtgccgaagcgctcgatgcggccgtcgccgcgatcggcggcaacgttaccggcatccgcgccgattccgccagccagagcgatctcgatcgcctgtttgcccgcgtcaaggaagaagccggccgcatcgacgttctcttcgtcaacgccggcggcggctctttcgcgccgctcggtcagatcaccgaggagcatttcgacgataccttcgaccgcaacgtaaagggcgtgctgttcaccgttcagacggcgctgccgcttctggccaaaggcgcctccgtcatcctcaccggctcgacgacgagcatcaagggcacgcccgccttcagcgtctattccgcctccaaggccgccattcgcaactttgcccgcaactggatcctcgacctgaaggatcgcggcgtccgcgtcaacacgctgagccccggcccgacggaaacacccggcctggtcgaactggccggcgacgacaaggcgcagcagcagggcctgctcgactacatggcgagcgtcgtgccgctcggccgtgtcgccgatcccgccgagatcgccaacgccgccctgttcctcgcctccgacgaatcgagcttcgtcaacggcatcgaactcttcgccgacggcggccaggcccaggtttaaggtcgcatggtcacccgcgtccgccgcgtcatcgtggcgggcgcggcactggaaagctcggcccgtttccgctaaagctctgactttgatagagaagtagcataggagacgacccgatgaccggaatgacaggctacgagatgttctggcccatcatcgcccaagcggcgctggtctacctgctctacatgctgctcggctaccgccgccagaagatgctgaagtcgggcaaggtgcgtgcatccgattatcgcgagaatcgcggcgagccgaccgaaagcctgatcgtcaagaacagtcttgccaaccagtacgaactcccggtgctgttctatgcctgctgcatcctgctctacatgaccgaagccgacaacctgatcgcgctcgtgctcgcctggatcttcgtcgccttgcgctatgtccacgccttcgtccacgtcaccagcaacgacctgcgctaccgcagcccgctgtttgccgccggctatgtcgtgctcggcgccatgtgggtctggcttgcggtctggatgatgtttccgaacggctgaacgatcgggattgatcgtcgtatagggcgaatcgcctgagtggacggctgccggcgagcggcacggtagaaagctcgccgcgatcaggggccagtcggccgaaacagcgtaaatttaccctccgaaaccgaccaaatcagggcgtatcaccccggtttggttgagcttttgcctgtcggtaaaatacaatctatcctgtttacgcctcatgaagacctgcatgtcatatcggccaaaagggccggtttgggcaatgtccggtctgcgaaaaagagggatggggaacgacatgaacgtcgggagcttcgatcgcattggcctccgcaggaagccgaaacaggaacgcagtattcagaggctggacctgatcctgtccgccgcctcgcagctgatcgcgagcaagggtgtcggcgccatgcgcatgaccgaactcgcggttgccgccaatgtgccgatcggctcggtctaccagtattttcccgagaaggcggcgatcgtcaaagccttgttcgaccgtcactcgctggccatccgcgcgaaggtcgccgaagccttcgcgtcggtgcaatccgtgccggaagcgctcgatgtgctcgaggcgaccatcgactggcactacgaggactatcgcaatgatgccgcgagcctcggcatctggctcggcacggagaccgaccaagacctctcgcggctcaatgtggagcacaatagccgcatcgccaggatcttccgcgagaccgcgcagcgcatcgcgcccgagctgagcgatgtcgacaccgaggcgcgcacctatctgttcagccatctgatcggctcgtcggtcaggcttgccgtgacgagcgatcccttcttcgccgcccgcatcctgcaggagtgcaagtgcctcgtgcgcacatccttcttcacgccgatgccggcagaactggctggcggctgaaagggcggcaagcgggctatggtccgcttaccagctggtgaccgtgttcgcgaccttcaggcgcggctgggcgcgcacgtaagcgcccttcacctcggcatcgagattgtcctccaccacggcgggcgtgatgttgtcgaggcaggcggtgatgtgcgcggtgatcgcgttcatcagcgagatcgacacgccgggccgcttcatgatgccgatctgcaccggcgggagcgcggggaaaccgtccgcctgggtcagaaccttcatgcccgtgcgcagcgccgattccggcatggtcgaaacggcgagccccgaaagaaccgccgccgcgatgacggtgcacgaccaactggtgaacaggatctggtgttcgcgcccgaccgcgtcgagggcggcgcttgccgcctgccgccaggggcagtcgcggcgcccgacggcgagcggcaccggtgcgtcgtcgcggatcggatggttggccgagcccacccagcagagcggttcggtccgcaccacgtcggacatgcgcacgcgcgggttatgcgtcaccagcgcgatgtcgagttcgccccggtgcatgcgctcggcgagatccaccgaaggctcgcagacgatatagagctcgacattcggatgcgtcttggcgaagcggccgatgatctcgggcatgtagcgttcggcatagtcgtcgggcgtgccgatccggagcgtcccttccagccggttgtcgtcgaatgcggcgatcgcctcgttgttcaggcggatgatgcggcgggcgtagttgagcagcttttcaccctcgacggtcagccggttgccgcggccgtccttgatgaacagctgcttgccgatccgctcctcgagccggcgcatctgcatcgaaacggccgattgcgtcttgtagacccggtcggcggccttggtgaagctgccggaatcgatgatggcgatgaaggtctgcagctggtcaatatcgagaggcgcggccatgattttcacctataaacatctctgatgctaatcattagaaacattcgttggactgatcaataggcctttggcatcttggccgtgcaaatcaatcaaagtgatggtcaggcaatcggcctgtccgctcgaaaatcaacttgcctctccgtgcctgatcgcgcggaaagggcgggttgttgcgcgccagtgaaaggatctcccatgcgcacgacagaccggatattggaactcgactgcaaccccgcgaccaggaccgtctcgcagcgtctcgtcgcaggcttcgcaatgctggcatccgtactgcgcgtgtttcgcaaccgtatggagatcaacgcgctgcacgagctcgacgacaagcagctgaaggatatcggcctttcccgggccgatctcgacgcggcctttctggcctcgaccttcttcgaggacccgtcggatatcctgacgcgatcggcgcgcaagcaaagccgaaattcgctccaccggctcaatcaggattagagccgaaaccagttttccccgcagggtgatagccaatagccctgcctcttgcccggtggcgacctcccagtcgtctccgggtttttttatgccggcttcaaggtttgggggaggcgggtggcgtcttcggcatatagctttcgaagatcgcttccatgttcttctggtagcccttctgcacctcgagcccgctgtcgaacatggtgttcagcatgtccatgtagctcgaggtatcgggtgccttcgccgccttgtcgccgcctttcggcgcttccgccggctgctgcggcgcaggctgggcgaagcttcccatcatctcctggaatgccttggtgaaggggttgtcgaggaagggattggccggcggcgccttttcgggctccggcttcggcgcgctgaacatcagctgcatcgcctgcgtgaacggattgtcgaaaatgctcggctgcggcgtcggcgtctgcttcggcgcgaaaccggtcgcctccagccactgctggatgctctcgcccatcgccgtgttgacgaaggggttcaccggcgcgttcatctgtcccatcgattgcttgaacagcccgcccatcagcgtgccggccatgatcggcagcatctgcttgtagatctcctggccgattccggtcatctgcgccgcctgcgccgccaccgcccgcgacacctccttggagccgaagagctgcgccaggatatcgttgccgtcggaaatcccctgcggcgtgaaggccttgctcatatcctcgaaatacttggcatagtttccggaggagaccgcctgcatcaggcccatgaaatcgtaggggttgctgctgctgcgcttcagcccggccgaaaaagccggcatcagggcggccatcgcctgcgtcgcctgttcctgcgccaggttgaactgcttggagatcgcgtccatcgccgcgccgttctgcgcctgcatcatcatgtcgaagagtggcagcatggaaagccctttcccggttcgcgacgcatgatcgcgccactatagccggaaaaagaaatgcgcaaaccgctttttggagaaggggttagatggagtccttgacccgttcccaggctttcagcagatggcggccgagaacttccgacagcgccttgccgtcgcgcgcctcaagtgccgtgatcatttcctcatgttcggccaccgcggccgcccatttgtccggcccttcgtggccgatgaagcggatgcgcttcagccgcgactgcaacagcgcctgcatgctggccagcgcctcgttgtgcgtcagctggctgatttccgtgtggatggcctggttcagcttgtaatagcgcagccggtccttggcctcgtagcattgcagcatctcgtcgtggatgcgcctgacccgggcgatctcctggtccgtcgccgtgacgcaggcgaggttgccggccagctcctccaggctcttcagcacgatgatcatgtcgtgcacgtccttgcctgtgaagcgcttgacgaccgcgccgcggctcggaacgagttccaccagcccttcgctcgccagatacttgatcgcctcgcgcagcggcgtgcgggaaacgccgagttgttcgccgagttggctctcgtgcatccgcgatcccggcgcgagttctccctcgatgatcatgtcgcgtagccggccgaccagggtgtcgtgcagtgcggtgcgctggatgggcccgctattggacgtgggcaggtcggacgatggttcgctcattcgaaggtcgggtcgctttgctgtagggccgaatactggattctagggttacacgagatcggcgccagttcaaactcaaaaatgctgcatacaaaatgcaaaagacttgttctcgcaatgcggatgccctacaaggtgccaatcttggtaggagaacataaatcgtggacatcaccgcgcatgcagacgaacgccccgtcatcgccctcgccatgggcgatcccgccggcatcagcccggaactgacggcaagccttcttgcccttgaggacatcaaggccaaggcgcacatcatcgtcatcggcgaccgccgcattctcgacaagggcgccagcgaagccggcgtcgtgcttgatcttgcatccgcgtcgctggaagacgccgccggcaccgaccgcgcccgccacgtcttcgtcgatctcgcgcatctcgcgcctgaagacgtcgcgcgcggcgaggcgacgctggccggcggcaccttcgccacccgaaatttccgtgcggcgctcgaattcgcgcatgcaggt

SEQ ID NO: 4 - DNA, 398894 bp, Rhizobium matallidurans
  source 1..398894: mol_type = genomic DNA
ggcgatgatgcccttcaggctctcgacgaaggcgacgggatcggcgaccgggccgagatcgacgacgaagctgtcgaattcgtcgtggtcgtgcggcgtaccgtcctcgtgctcgagttcgtggtgggacttgcggttgccgatatcctcctcggtgccgatgccgagcccgagcaacacgctcgtcggcaccacgccgtttttggcctcgatgatcaccggtttgcgcgcggtgcgcgaggcaacctcttcacgcacacgagcaaggccggcgccgtcgatcaggtcggtcttgttgaggacgatcatgtcggcgcaagtgagctggtcctcgaacagctcctcgatcgggctttcgtgatcgagcgtgtcgtcctcgacacggcgggcttcgacggcatcgtgatcgtcggcgaaacggccggcggcgacggcggcgctgtcgaccacggtgatcacgccatcgacggtcacctgcgtgcggatgtcaggccagttgaaggcggcgaccagcggctgcggcagggcaagaccggaggtttcgatgacgatatgatcaggccggttttcgcgctccaggagcttactcatcgtcggaatgaagtcgtcggcgaccgtgcagcagatgcagccattggtgagctcgatgatatcgtcctctgtgcagttttccgccccgcagcccttcagcacctcgccgtcgacgccgaggtcgccgaactcgttgatgatgagcgcgatcttcttgccattggtgttggaaagcaggttgcggatcatcgtcgtcttgccggcgccgagaaagccggtgatgacggtggcggggatcttctgctggctcataaaattcaacccttcattttcagcggcagtcccgccgcgataaaatacacgtccgcggcgaccgccgcgatcatctggtgcagccggccggcatggtcgcgaaactcacgcgccatgcgattgtccggcacgatgccgaggccgacttcattggaaacgatgacgaggcgcgccttggcgcgcggcacgtgggcggcaagcgccgcgaattccgccgccatgtcgcgctcctccatcatcagattggtgacccacagcgtcaggcagtcgacaagcaccgcccgccccccgccgtcgatcgcggccagctggccgacaagatcgagcggctcctcatgcgtggtccacaggtcgccgcgatcggccttgtgctggtcgatccgcgcgcgcatctcctcgtcccaggcacgcccggtggcgacgtagtggcgctcgaggccgctgtcgatgacgcgttgttcggcgaagcgagacttgccggagcgcgcgccgccgaggatgagggtggaggaagccgtggtcatgccggaacggcttccattgtcgagcgccgcgacccgccaagatcgccctcattcctgtgcccaagcttggctcgggcgatgtcacaggaatccagtgcgcccaagtccttgggcgcgagagaccaccgacccagcagaaaagagtcattcaccgcgcggacgcacggtggctggattcctgtgacgagcacaggaatgagggagcttatatcgaacatcgcgagcgtccggcctgacgccgacgccaaaatctcattgtctgccatgacaacctccgtgctggcatcgggcaaagcgccccgggttgggctttgcgcccggcacgagtggcaggtctcctggctcgcgggtccaggcgacgatcgggagagcagcaagtggctctcccgatcgtgccatcggatcttcctcgccttcccggctgcaatcatgaaaaggcggacgattcgtagatagggaggcgtccaaccccggttgatcatggcttgcatcgccagtggcttttccgccgccttcagccccttgtccgcctgcaccacgcaggcatcaggcaagagcgcatccgacgccggacggaagaccctgaccgctctacagtcgcggggtcggctgtgatgaaggcgccctggttgggtccaccccgtcacattcccttttcatccgcatcgcttttggcgatccggaaccatccgttatcgatccatcgttaggcaagcgcggccgcgaagtcaatcgaccgccaaacgccgccaccagccaaattggcgagacgcattccaaagacgatcatctctaccagatttatcgtctataatcatggacttaatgtcaaaaaaacttgttgtgccggccgggttttcgccgcatttgcagcgcaagcggccagcaccgctttatccccattcccgcacaaccttgaacgggccgccgcccgcccaattttcccaccatgcgcctgaaaatcaatctccgacagctcggcccgattcacacgcttctcgatgtcgggcgcatgcgcgcgctcttgcggcgcagcgaaatgggcatggtgcttgccggcgcgttggtcggcgtcacctcgggcctcgcggtgaccgcgatgagcctgatttcgcgtgaaatgcacagcctgatcttcggcatcagcgacgtcgaacgcctgagttcgtccgagatcaacgacaaattcctgctgatggcggccccggtcgccggcggcgtcctgctcggcctcctgatgtacgtgctggccaagacccgcaagaagccgatggtcgacccgatcgaggccaacgcgctgcatggcggccgcctgtcgctgaccgacagtatcatcgtcgcgatccagaatctgatctccaacggcttcggcgcctcggtgggcctggaggccggctatacccagctggcctcgggcatcgcctcaaagctcggttacaagctccaactgcgccgcgccgaccttcgcgtgctcgtcggttgcggcgcggcgggcgccatcgcggccgcgttcaatgcgccgctcacgggcgccttctatgcgttcgagctgatcatcggcacctacacgatcgtctcgctgacaccggtcgtcgtctcggcgctcgtctccacgctgatcgcccgctggctgggcggcagcgatttcatcatcgatatcggcgatttcggcaccgtcatgcccgccgattacatacccgccatcctgctcggcgctttctgcgccggcatcggcatcctgatcatgcagggcgtcgccttcgtcgaggagcttgcccgccgcagctcgatcgcgctcccgtttcgccccgcgctcggcggcatcgtcgtcggcctgctcgcactggtgaccccccaggtactgtcggccggacacggtgccctgcaactcaatctcgcccgcgatgttgccattccggcgctggtgggtctgtttctgctgaaggcgtttgcgtcggcgatctcgatcggttccgggttcagaggcggtcttttcttcgcctcgctgttcatgggcgcgctgctcggcaagttcttcgcctactcggccccctatttcgcccaggcgtcgctgacgccgatcatctatgccgtcgtcggcatgagctcgcttgccgttgccgtcatcggcgggccgctgaccatgaccttcctggcgctcgagatcaccggcgactttccgatcaccgtgctggttctcgccgccgtcatcacctcctcgctggtcgtacgcagcaccttcggctactccttcgccacatggcgcttccacctgcgtggcgaaagtatccgcagcgcccacgatgtcggctggattcgcaatctgacggtgaacaagctgatgcgcgccgacgtcaagacggccaaggttggcaccagcatcgaagccttcaaggaaagcttcccgatcggctcggcgcagcgcgtcatcctggtcgaagacagcggcaaatatgctggcctcgtgctcgttcccgatatctacgccaacctcaccgacaccgccgacgagagcaagggcctggacgaattcgtgcgctaccgcaacgacttcctgacgccgcagatgaacgccaagcaggccgccgcgatcttcgacaagaccgagagcgaagcgctcgccgtcgtcaacaatctcgtcgaacgcaccgtggtcggccagctcagcgaagcccacacgctacgtcgctacagcgaagaactggaccgccgccgccgcgaggtctcgggcgaaatctagtcttgcgggctgagcaggctatccagccagcgcttgtccagatgggtttcgagctcggcggcaacctcgtcgagcgcctgctcgacgccggcacgataattatggctctggccggtcaggccgaagcttgcgagcagcctggcccggtagccgtcactcgcgaacaacccatgcagataagtgccggcgatccgcccatcgcccgagatcgctccgtcgggctcgccgtcgacgatcgcgaagggccgcacccgatcggcgccttcggtcgttccgagatgtatctgatagcccgaaagaggctcgccggtctcggccgaaaccgccacgctattgcggaccgtcttctcggcgtccatgacggtctcgacctcgagcagcccgagcccctcgatctcgtgcacgctcccttcgaccccaagcggatcacggaccatccggcccagcatctgatagccgccgcaaatgccgatgacccgtccgccgcgcctgacatgcgcggcgagatcattgtcccagccctgcgccctgaaatcggcgagatcggaaatggtggatttggaacccggaaggacgatcagctgcgcatcgacaggcaaccgttcgccggcgcgcacgaaaaccagttccacatccgtctccgccagcagtggatcgagatcgtcgaagttcgcaatccgcggcaacaccggaacggcgatcttgagcgcccccgccttgccccgcgccagccgctccagcgccaccgaatcctcggccggcaaccgcgccgtcgccttcagccacggcaccaccccgaagcagggccagccggtgaaccgaccgatcgcggcgatcccgtcgtcgaacagcgacacgtcgccgcgaaacttgttgatgatatagcccgagatcatggcgcgatcctcgtcggacaggatcgtgtgcgcgccgacgagagaggcgatcacgccgccgcgatcgatatctccgacgagaacgacaggcacgccggcccgcgtcgcgaaccccatattggcgatatcgccgggccgcaggttgatctcggccggtgaccccgctccctccacgatgacgagatcggcgccgcgagcgatcctgtgaaagctttcggtgacgtagtcgagcagctgcggcttgagcctctggtagtcgcgccccttggcctgcccccagaccttgccctgcacgatgatctggctgccgacatccgattgcggcttcaagagcaccgggttcatatgtacggatgacggtacccgcgcggccatcgactgcagccactgcgcccgcccgatctcgccgccatcatcggcgacggcggcgttgttcgacatgttctgcggcttgaacgggcgcacttgaagaccgcgattggccgccagccggcacaggccggcgacgagcaccgtctttccgacatccgagccggttccttgcagcatgatggctttggtcattggcgcggcgctccgaaaaactgggagacggcgtacaacggcgcttcggtaccggtcaatcgcaacccgccgatcgcaagcgccctaaatgcgaaagccgcgcagacctgaggtcgcgcggcttgccgaaatacgctggcgctttgcccatacgcggcgaagctcacgctccccgggacgcaatacctgatccgggaaagcagcggttgtcccccgccacgccgctattcttagcgccacatcgttaccggatggttagtgagcacttaaccaaatatgaattgtggcggttttgacgattttgtttcggcaacgatatgagccggcgggacaggttgccgcaagcaagcgattgcataaacgcgccgaacacggatcgccaccaccggcgatgcacgacagactgacgacatggagaatgacgatgacctcagccccgtttcccgatcccgagacgatcgcggccaggctttccgcgctgggcgagcaggacaagtcctatgttgcgcttgtcatggaaaatcccgcgcaggacgacagcctgctcgacggcattcaccgttacctcgaccatgcctcgcgcgcgccgttcctgaattcgctgaagctcgaggcattcggaaaatggattggagacgcagcgccgccgcgtctccagattcggttgatggaggcttccaagtccagccagcatcctgcttatagcgccttccgcaagggcctgacggcatccggcgggctggacaaagcctatccgcaggcgaaaatctgagccggcttaccgcttggccgcgtgatcgacgctgcgaccggcatcctgcgtggcgttgacggcgttcgccgtgtcgcgaccgacgccacggatggtattggcgcacgaggccagggtgaacagaagcatgatggcagcaccaatctttaccgtggtggtcattgtcggaaatcccttgttaaaaaccgctctccgcagacagtcgcgcgactgctgcgcggtgataacgcactgaacccaaaaaggtttcaggccggcttccgtttttttgaccgccattagccggccacaggtcacggggcccggaaggcttcaggcggcgatcgccttggccttttcgctgaatgcgagccggatactttcggccaccgttttcatcggcgcggtcagctgcgagatggtcaacaggcggatatcgaaggagccgagctcgggcagcccgtcctgcgcgccgaggatgaccatgtcctcaccgacataggagcgcggcagcggcgcgatcgccagatcggagaccacggcggcgcgctgcgccatcgtgtgaccgctgagaaacgccacgcgaaaatcccgcttcatccgttcgagctgcgcaagcgcctcgagccgccagatgcacccctcttcccagatggagatcggcagcggctcgcgccgatgcgctgtgccgcacttggcgccggcccacaccagccgctcgcgatagacgatctcgccatcggtcggcagcgggcgcgtggcgcagttgatcagcgccagatcgagcctctgctcctccatgcgctttctaagcccgaggctcatgtctatggtcacatcgaccatgatgcctggaaaactctcgctgaagttcttcaggatacccggcaggatgcgctcgccgatatcctccggcgctcccagccgcacgacgccgctgagctcgggcatgatgaagcgcgataccgcctcattcgacagagccaacatgttgcgcgcgtaggacagaagaacctcgccatgctgggtcagcgaaacggagcgcgcgtcgcgcagaaacagcgtggcgccgagttgctcctctagtttcttgatctgcatcgagacggccgatggcgttcggaaaacagcctcggccgcggtcgaaaaattgccggtctccgcgatcgccacgaaagtgcgcaacacatcgttgtcgaggagcggaatgggacggcgaagcggagctgtcatcatctcatctttcaattttcctgatacataacacaatatcattttgtttgattgaaagtcaatcgcggttcaatctggttgtcatcggagcacttcggaaggagacaaaccgatgaccatcgcgatcctgatagacacactgcgcaatttcatcggccgtcgccgggttctcaaaacgcggcgcgccgccatcgaacagatcgcgcgccagcccgtccacctagcagccgacgtggacatgccgcgccgatacgcgccagcaggcatcaccgtcgtcatcatcaccgccatcggctgcccgatccggattgtcggccaatcattcaaaatccttgatgatagccataaactctattcgtttgattgatggaccatgtgggatcatatcagtgacaacgaattcacaaccgagagacgtcggtcgatacgcgaaaggacattcgacatgaccacgatcaccttcagagacaacaagctgcccggtgcggcgcatcatgatcactccctgtccgcctacgcccacaagcttgcccgcgcatggcatcagtggcaggctgcgcgcgaaatcgaagccatgccgatcgacatgcgcaaggatttcggctggccgtcggccgataatgtggacgaccacaaggcgatgtaatggatgcgacatacctccccgcgcgaaagcggcgcctgcctccaagcagcgccgctttcgtcgtttcaggaccttccggatttaatcttgaatttcaggaacatgtatttcgcaggcggcgtttggcgaacatttgttcttgtcaaaagccaattgatcgccgtcaattatagccatgtcgcaattttgctctttgcggccgcatttttccatgagaatgtcgctttctgaatatcgaagcggcgcaatccaagcaccaatagcgcattggccctccatcatggatttctcacatgagcaagatgtcgcataagaaacgctccatcgtcttcttcatggttccgcagtttacgatgctgcccttttcggccgcgatcgatacgctgcgtatcgccaaccgcatgctgggctaccaggcctatacctggcgcctgacctcggtggatggcgaaaaggtctactcctcctgcggcatcggcgtcgaggccaacacgtcgctggccgacgagcgccgcaatctcggcggcgagaaccgcccgagcatggtgctggtctgttccggcatcgacgtcgaggaattcaacaacaagtccgtcaatgcgtggttgcgcgaatcctacaatcgcggcgtcgccgtcggcagtctctgtacgggcgcgcatgtgcttgctcaggccggtctcctgaatggcaagcgctgcgcgatccactgggaaaacctgccgggcttctccgaggccttcccgcaggcagaggtctatgccgatctctacgaggtggacagcaatctctacacctgcgccggcggcaccgcttcgctcgacatgatgctaaacctgatcggcgaggatttcggcgagacgctggtcaaccgcgtctgcgagcagcatctgaccgaccgcgtgcgcagcccgcacgaccgccagcgcctgccgctgcgagcgcgcctcggcgtccagaacggcaaggtgctgtcgatcatcgaattgatggaaggcaatctcgccgagccgctgtcgctgctggagatcgccgatggcgccggcctgtcgcgccgccagatcgagcgtctgttccgccaggaaatgggtcgctcccctgcccgctactatctcgagatcaggctcgaccgcgcccgtcacttgctggtgcaatcgtcgatgccggtcgtcgaagtggccgtcgcctgcggcttcgtctccgcctcgcacttctccaagtgttatcgcgaactttatcaccgctcaccgcagcaggaacgcgccgagcgtaagatgacgatggcgaccgcacgccacgcgatcgccgcctgagccttacgcttcgccgacaatcgtttcacgacggcggccgcgaaacgctgtcgtgaacgcgtcgttactgcgccgccgtcgtcaccacgcgcgcatcggagtaaacctgattgcgcccggaacgcttggccatgtagagatactggtccgcggcgttgagatagttttcgaacgtctcgtaaccgcagatttcggccacgccgatcgagacggtgaccgagatgtcctcctcgtcctcggcaacgatcttcagcgattggatatcctcgcgcacacgatcgcaaagggctgtggtggcagccgagtccagtccggcgaacagcatggcgaactcctcgccgccgacgcgcgacaagagattgtcgctgccgatgaactcgctctgcagccgcgcggcgaccgccttcagcaccctgtcgccgatttcgtggccgcgggtatcgttcagctgcttgaaatgatcgatatcgagaacggcgaccgaggcgggccgggcgccgcgcaggcattccgtgacgattcgcggtccttgatcgtagaagtagcgcctgttgtagagcccggtgagatagtcgctcgccgccgccgcccgcagttgcctgatctgcgtcagcgtctcgatattgttcgagatgcggcattgcagttcttccggcacgaaggggcggtagacgaaatcgctggcgccggccttcaggaagctggccgacagcaacctgtcacccgacgaggatatgccgatcacccggatgcgctcggtgctgtagcggttgcggatccgtcgtgtcagttcgtatccgtccatgtcgggcatatgatggtcggtcagaacgagttcgatgtcggggtgccgttccagcacctccagcgcctcgatccccgtccccgcctggcacaccttgaactgctgggcttccagaagttcgacgagcgcgcttcgggcggaaaccacgtcatcgacgaccagaacccgggttctgcggttcgagatcgcgcggcgcacggcggcgatcaggttgtcgagcgcgaactcgttatccttgacgacgtagtcgacgacgttacgcgatgtgatccggttgcgcacgtcgacattgaacgacgccgtgaagacgacggcggggatatcctgcgcaaggatctggtcaagcgcctcgccatccctggagccaggcagattaaggccaacgaccgccatggtgaaaccgtccgacgcatccttgagcgccgcgtcgagcgcctcctgagacgcgcaatgcgtcaccgtcagcccgagttccgtctcgaaacggtgtgacagcacggacgagaacattcgcgaatcctcgaccaaaagcaatgtgcggccttcgcgctgcgatgcctgcttctcacgcagaatatctgatttcatgacagtcacttgcctctatgcggcgttgccttgcgaacgaactccaccccgcgcggccgcgcgaacgtcggcggtgcgaggctggagattgaacggtgggtatggagcgatccccgtcacctcggtgcatgggttgcaccccggtgcatggattgcaccccggtgcatggattgcaccccggtgcatggattggcgaacccagccgaattcaggcgctcttgcgcatcggctgcatcgattgaatctgaagaagcgtgtcgaggttctggttgacccggcaatagaactcttcgtcgatgaacggccgcagcatgaagtcgttgccgccggctttcaggaagcgtgccgacagcaggcggttggaggatgacgacacgccgatgatccgcaactggtgtgagccgatgctgccgcgaatgcggcgcgtcagttcgaagccatcgatatcgggcatgttataatcggtgatcatcaaaccgatgtcccggttggccttgaggatttcgagcgccttggcgccgctgtcggccgtgctcacacggaaattgtaacgcttcaggcggctcgacagaagcgcgcgcgccgtagggctgtcatcgacgatcagcacatggtgacgatgattggtcaggaagcggcaaatggattcggccagcagatcgacggcgaagacgttgtccttgaggatgtagtcgacgatatccttcgacagcagcttgtcgcgcatgccttcatggaaggtgccggtgaagacgatcgtcggaatgctgaggtcgacgagatactcgagcgcctcgccgttctcggcgcccggcaggttgatgtttgaaattgcgagggtgatttcctgggacgacttgtcgtagcagagctgaagatcctcgaagttccggcagatctcgacgtcgatattgaagagctccttcaaacgcttgccgatcatcgacgtaaagacgtttgaatcctccgccagaacaatacgaacatcattaaacgcgtcaccggaatactgcatcccggaaatccctaaaaacgccatgtcaaaaccccgaactgaaatatgtctccctgcgtcaaagcggtacatcgggcggtttgaataagtattaaacgaaaagcttacttgcggcacaaacggcagcaagcacacgcgctggcgcttttcttcgcaacatgattaaaggacggttggcagcccgctattctatcgcctagtgaccagccgaagcacggcgtcagcggtccacggtcttgccgcgcaactggctaacacgacccgtctcctggtcgatcttctcgtcgccggcagggtcgtcacccaaggcctccgggtccagaacctcctcgtcgtcaggcgcaaccggctcgggctggcggtggaacacgacatcgctctgcggcagcggtatctcgatcccctcctcgcggaaccgcttcaggatggcgatgcgcaaatcgttgcgcaccctcaatccgtcgcccaggtcgccgagcatgaagcgcagctcgaaatccagtgaatagggtccgaagcgcaggaactcgacatgtggttcggggttgcgcagcacgattggcagcgtattcaccaggtcgagcagaatatccatgaccttctgcggatcggaaccgtagctgaccgaaaccgggatctcagaccgcccgatcttgttgcggtgcgtccagttgccgacattggcgttgatcaggtccgaattcggaacgatgatcgtctgcttgcggaaggtctcgatctccgtcgcgcgcacggagatgcgcttgacgatcccttccaccgtgcccgtcacgacgtggtcgccgaccttgaatggccgctcgacgagcaggatcagcccggacacgaagttcgacacgatgttctgcaggccgaaaccgataccgaccgacagagccgaggcaaccagggcgaagctcgacagattgatgccggccgccgacacgccgatcagcaccgcgacgccgacgccgagatagccgatgccggtcttgaccgagttgcgcacgccaagatccacatggctgcgggccatgacattgttgtcgagccagcgctgcacccagcgcgtcagcaggtagcagccggcgaagagcaggatgccggtgagtatcccgaccagcgatatgctgatgccgccgagccggacttccgtgaagagccgataggcgatcagctgcaggtcctggatgcggaagccccacaagagcaggatcaacggaatgccggtcgccaaagccacgccgtagatgcagaaaccggccagcaggccgacctgatcgacggcgacgggaccgagcttgaagcgcgacgccagatagcggcccggccgcgtgtcgccaaaggtctcggtgcgcgaaatcgccttgcccgaaagcagcccgatataggttgtcacaccgatcgcgccggtgaagatcagctgcgaggcgatgaaccgcgccagaccgacatagccggtaacggcggcgaagatcaggaccgcgccaagcacgcgcagcacgatggcaagccccttcggccaatgccgcccgggcgcatccgggtcgcggctcttggccatcatcggtcgcccgaacgatgccgcgatgaggatcaggccgatgatcagcgcagcgatccagctccggacgacggtcagcaccagcggcgaacccatcgattcgctgatgctgccgaagaagaaatcgagcgcgtgcacgaccgccatcgccatcaggcaggcgctgatcgagcgtgcgccgcgattggacagcctgacgagacgccattgaggatcgcgcggcgcgaacacggcgttggtgaagcgtcgaacgaaatagatgacgccgatcgttgaaaacagcgcggcgacgacgggggcgatgtcgggcctgagaacgttgaaactgtcgagaaagagataggacgtgaccagaagcgtcgccagcgacagcgtcctgatcagcgtcgaccagaaggcgatcgacaaccggctgatataggagggctgctcatcgctctccttgcgctgcagataatgcccgaacagccggtagctgccggaaagaaggatcagggccgtcgcgagcgacatgaagatcgccgcggcgaaggcgaatgccttgaatttcagcacgaagcccagccagctcgtcagcgcctgctggaacgcccccacctcctgaacgaaggcggtcccggcatcgccgagcacggacgcggaaatttcgctgcgtcgcagaagcgtcgcggcgaaaagcttgcggcgcatttccgcgatctggttgctcatcctgccgatcgaggcggtcaggctctcggcgtcgccctgcaggacgttgagttgcgcgcgctccgccgtcaatgcgtttcgctcgttggtgacgatctccgcctcgggcggttgccccgcctttggcgggtcgccaagctcggtcagacgggccttgatctggtcgaggcgcggcgtgataccgccggcgataccggcaacgccgcgattgagctcatcggccttgccggcaagcgcgaccagcccgtcatcgtcgtcgacgctctgcttgacgctcgcctgaagtgccgcgaaatcggactttgccgtggccatgttcttggcggcctgatcgcccggcccgctctgtgcggcggcgctctgctcggcggcggcgggcggtgcgctctgcgcaggcgcggcgggcgccggtgtctgcgcttggagtgacccagcgccggccacggccagcgagacgaacaaaaggctctggagcagaaaacgtgtcagccgcaaggtatccccgccaggttcgatagtgagaaagagcgcccgcttttcataagaaagaaaggcgacagaaaggcgacgcggcgcgaagcaatcgtgtgtgccaaccgcgttcgccaatcatgcatgatcgacgcgcagccctcgctagcacatcgcggcccgcgcggcgacgtggaaatcggccacaccccaaatcacggttcacggcctatcgccgacgcttgtgcccggacacctcggcgccggcatcggcgggcagttgcagaaagcgcagcgacgagaccacaccgatcgcaccgatgacgataaaggcccagcgaaaatcgacaagccctggatcgccaagcccgcgcagcgccgccgaaacgttgagaacggcagccgcgatcgcgacaccgagcaacatcgacacctgctgcaacatgctcgacaacgtcgaagccgagcttcgctgcgcgccgctgatatcggcgaaagcgagcgtgttcagcgccgtgaactccatggagcgcgacagaccggcgatgaacagcagggcatagatcaccacgcgcggcgtctccggcgcgagaaagccgcagccgacgatcgacagcgacgcgatcagcccgttgaagcacagcaccgtccggaagcccagccgcgcaagcaacggcgtcgtcacggtcttcatgctcagattgccgaggaagtagatcagcagataggcacccgcttcgatcgagctgagcccgaagccgagctggaacaaaagcggcagcagaaatggcgtggcgttgacggcgacgcggctcgcggtcccggccgacagcgtggcgatggcgaaggtctgcaccttgaacgacgacagatcgagcagcggattgtcgacgcgcatgaaatgccgatacgccatgacggatagcacgataccggcaaccagcatggcgccgacgggaacgattccgccatgccatttcaccgacagttcgagcgccgccagaagaagcgtcagcccggcaccgctgaggatgaagccgcgcaggtcgagccgtccggcattctcctcgcgctgttccggcacgaaacgccagacaagcgccatgccgagcgcgccgatcggcagattgatcaggaagttccagtgccagcttgcataggtggtgatgacgctgccgagcagcggtccgatgaccggcgccgtcagagccggccatgtaatcagcgcgatggcctgcaccagttcggatttgcgtgcattcttcaagacgatgatccggcccaccggcgtcatcagcgcgctgccggcgccctggagcgcgcgggcaagcacgaattcggtgaggctgccggaaaggccgcagagcagcgaggcgaaggtgaacacgccgatcgacgccatgaagacgcggcgcgcgccgtagcggtcgccgagccagcccgacagcggaatgaacgtcgccatggtcagcatgtagacggtgatgccgatgctcatcgacaccgtgggaacaccgaagctcgccgccatctgcggcagcgaggtggtgacgatcgtgccgtcgaggatctgcatgaagaaggatacggcgacgacaagcgccacaattttcgaacggcgcgcgctgcccgcgtcaccatccgcctcgaccgtctcaactgctgtcatcactctgccaatgtgaaatctggatcaaacggccggcaacagcacatgcgacgtggggcgtcggtcgaacccgatcgtagataggcccatcccacgaagcgggaaagagaaaaacgaccagggcgggcaatttccatgcgccagcgcctgctgttaccgtggcgacgggggatcagccgaggatattgctgatcgcccgcaggaacactccggcgccgaccgggatcaacgcctccggaaaatcatagtcgggattgtgcaattgcggatgcgtttcgcctgacccgagaaagaacatggccgacggcgcgacggttcgaaacagcccgaaatcctccgagcccttcatcggcagcaggcggctgtcgctccggtgactgacgccctcgtcatccagcgcccgccgcagcacatcgacggcctccggcgaattgaagcactggcggaacacatcctcgtaggtgatctcgatcccgagcccggcggcatccgcctcgctcctcgccagcatctcggcggcctgaaccagcccggccatccgctcgtcggtgagcgtcctgagcgtcgcccatatctcggcccgtccggggctgataccgaaggcgggctcgccgagccgggcatgggtgacagtcaccagcgcgaaatccggaccgacgggcgcgacactcccgagcgcggtcaatccgccaagcaggctggcgagcgcgaacgtcggcgcaacgccatcctccgggcaggaggcatgggaggtcttgccgctgagaacgatcttcatcccgcgcgaggcgcagttgaccggaccttcgcgcaaaaggacatgccccagcggcacgccgggaagattatgcagcgaaagcgccatgtcgggcttcagcgtcgggaactcgggatcggcgagcaccgcggccgcacccgcgccattttcctcggccggctggaacaggagaatcaccctgcccttgttcggccgcttctgcccgagcgcggtcgcgaccgccatcaggatcgccatgtggccgtcgtgaccgcaaagatgtcccttgccgggaatggtcgaccggtattcctcgttcgatatctcctcgatcggcagcccatccagctcgcagcggatgagcaccgtcgggcccggaatagccccgtcatagactgcggcgacgccatgccctccaaggttcgacacgattcgatcgggctttgccagcagcagcgcttcctgcacccggcgcgcggtctcgacctcttcgcccgacacctcgggatagcggtgaagctcccggcgaaacgcggtgatatgggaaagctcttcctgtgtcagaaacatcggcgtcatcctgcaaatcaagttgcatgctatgtgcgcctgatatgggtagcaagctgcttgatggaacgggcaaatcattcggcacagctcgaagcgccgccgaactttctcttttcggctcggctgtatttgtatatgtaatggcatattcacaggagaaaagcatggaagcggatgaagccgaccggtaccgggcgcctgccttggacaaggggcttgatatcctcgagcttctggcaagcgtcgaagagggtctcacacaggcggaaatcgccaagcgcctcgaccgcagccccaacgaattctaccgcatgctcgaccgtctcgtgcgtcgcggatatgtcaccaagctcgagggcgaccggttcacgctgacgctcaagctcttcggcctctcgcagcttcacgcccctgcccgtcgcctcgcctccttcgccatgccgctgatgcgcgacctcgcgcagcgcacccgccaggcgaaccacctcgtggtcttcgatcgcggttccgccgtcgtcatcgcccagcacgaggcgccgaactactggggcatctcgatccgcgtcggctcgcatatgagcctgctcgaaacaggctcgggccacgtccttctcgccttccgcaccgacgaggaacgcgagatgatgatcgcggaacatgcccgcgacccgaagaccaagcggccgggaccagagctttatgagcgcctgaccgaaatccgaaaacgcggttacgagatgatgccgagcgcccagacggccggcgtccacaacctctccgccccgatcctcggccccgatggccgcgtcatcgcagccctcacctgcccctatataggactcgtcaacgcatccgacgcgcccgatatcgagcagacgatcgtcatgctgcagcaggccgcgcgcgacctctcgctgcttgcgggatcggatgtgaaaatctcggggtgacgcgacgaacagtatcgtcgcgcctgttgccgtctatacggcgatccgagccggcacctcggccatgtactcttccagcatggcggcttgctcgcgcgtcaggcgcaggccctccttggttcgtctccagagcacgtcatcggcatgtgtcgcccattcgtgctcgatcaggtagcgaacctccgcttcataaaggtcgctcccgaacaggcgtccgagatcctcgatgccgcgcgcctgcccgagaagcaccgcggccttcgtgccgtagcggcgaacgaggcggcgagcatgtgtttcggcaagaaacggatagccgctcttcagcttgcgaacttccgcctcatagcccgtcgccggaaaatcgccgccgggcagatggcttttggccgtccaggggcttcccttgatcccgatcgccgcgccgatcttttcaagcgcatgctcggacagccggcgataggtggtgagcttgccgccgaacacgttgagcaacggcgcctgtgcgccctcgccttcgagcttcagcacgtaatcgcgcgtcgcctcctgcgccttggaggcgccgtcgtcgaacaacggacgcacggccgaataggtccagacgatatcctcgggccgcaccggctcgttgaaatactcgctggcggccttgcagagataggtcgtctcctcgtcggagatcctgacatcccggggatcggccttgtaatcgcgatcggtggtgccgatcagcgtgaaatcctgctcgtaggggatcgcgaagatgatgcgattgtcggggttctggaagaaataggcccggggatcgctgaacttcttcttcacgacgatgtggctgccctgtaccaggcgcacatgccgcgcctcgttctgaccgaaggcggcgcgaatgacgtgatcgacccacggccccgccgcgttgaccagcatccgcgcctggaaatgacgcgtctcgccggtcaccgtatccacgctctcgatcgcccagacgccgttctcgcggcgcgcggagacgaccttggtgcgcggcatgatcagcgcccccttgtcggcggcgtcgcgggcgttcatgaccaccatgcgcgcgtcatcgacccagccgtcggaatattcgaacgccttggagaacagcgatttcagcggcttgcccgccggatcgcggcgcatgtcgagcaccttggtcggcggcagaagcttgcgaccgccgaggtgatcgtagaggaacagcccgagccggatcagccacgccggtcggatcccgcccttgtgatagggcaaaacgaagcgcatcggccagatgatatgcggcgccatcgcccacaggatctcgcgctccatcagcgattcccgcactaggcgaaactcgtaatgctcgagatagcgcaagccgccatggatgagcttggtggcgcccgaggaggtgccggaggcgaaatcgttcatctcggccagcgccacggaatagccgcgcccgaccgcgtcacgcgcgatcccgcatccattgataccgccaccgataacgaaaagatcgtgtacctgaccgctcacgcgtcccatgcccccagaaattgccgcaacgcaaacaagatagcgcaattgcgaaagtcaatacagttaaagcgaaagacattcgaatgtcaaacgaatgccttgcacacttatgcccggcgccgatgtcggacgtgtgacagcgcggcagggctacgttccagattggcaaggaatttcaattgggctcggcgacccggaaataggcgcgcggcggcgcgccgagcatgcgcttgaacatggtggtaaacgccgcgacgctttcatatccgagatcgaacgccaccgatgttaccgcttcgcccgcggccagtcgcggcagcgccgtgaacagggccgcctgctgccgccaggtcgaaaggctgatgccggtctcgcggcggaaggcccgggtgaacgcccgccggctcatgttgagccgctcggcccaatcgtcgatcaggagtcgcgcggtcgggttcgccagaaacgcccggcacagcccggcaagcctcgcatcaccaggaatgggcaggccgagcgaccggtccggaagccgcgagatctcctcgagcagcagcgcgacgaccagcctctggcgccgcgaactcttaatgtctccatccggggacactgcctcgatgatcagcgcacgcgcgagatcggtcagcccgacgacgcgaatggcctcgggaagagcgaccagcgcatccgaacttatataggccgagagcatggtcacctcgcccagcatgtccaccgagtgatccagccccgccggtatccacagcgcatgttccggcggcaccatccagcgcccctgccgcgacgacaccatcagcacaccggtccgggcatagacgaactgcgcgcggctatggcgatgcgccgccacgtgatagcccgacgggtactgcgacgggatcgtgtgaaccggctcggccgccgcctctatggccgccagccgctcgacatgcagcctcgccagttccgccgacgttatattttgcagcgctttcataagccttggcccgatcgcgaaagaatgagaccaaaacacgaaagcgggactgccgcaaggagactatgcggatagtaggttcgacggaggaacatcgtgacgacaggtatagaaacggcggacaaacacgccgcggaacagacggtattcagcatcatcatggcggtcagcttcagccatctgctgaacgatacgatgcagtcgctgatcccggccctttatccgatgatcaagaccggctacggtctcgacttcacccagatcggcctgctcggcctcgtcttccaggtcacggcatcgctgctgcagccgctgatcggcatttacaccgacaagcgtccgctgccctattcgctggcggcgggcatgggcttcacgctgatcggcctgctgcttctcgcctatgcgcacgcctattgggtgctgctgctcggcgccggcgtcgtcggcctcggctcggcggtcttccatccggaatcctcgcgcgtcgcccgcctcgcctcgggcggacgccacgggctggcgcagtcgctgttccaggtcggcggcaacttcggctcggccatcggcccgctggcggccgccttcatcgtgctgccgcgcggacagaccagtgtcgcgtggttctcggttgccgcgctgacgggcatgatcatcctgtggcgcgtcggcgtctggtactccaaccaccgccgcaccaccgccggccgcaaggtcaagcaccaggcagtggtgctgccgcgcgccaaggtgatcctttcgatcgccgtcctcgccatgctggtcttctcgaaatacgtctacatgaccagtctttcgagctactacaccttctacatgatcgagcgcttccaggtgtcggtccaggaggcgcagatccttctgttcgtcttcctcggcgcggtcgccatcggcacggtcgccggcggcccgatcgtcgactggttcggcaccaagttcacgatctggttctcgatcctcggcgccctgcccttcaccctggcgctgccctatgccggctacacctggacgatcgtgctaaccttcgtgatcggcatcatcctggcgtccgccttctcggccatcgtcgtctttgcgcaagaactggtccccggacgcgtgggcatgatcgccggcctgttcttcggcttcgccttcggcgtcggcggcatcggcgccgcgggcctcggcatggtggcggaccgcatgggcatcgtcttcgtctatcagctttgctcatatctgccgctgctcgggcttctcaccgtcttccttcccgatctcggcaagggccggcgtcacgcaacggcaacgaaatagccgcggccaagcccacgaggcggcatcaaaaccacaaaaggccgaagcacccgcgcttcggccttttgtcttcaaacttcacacgatgccccggcgcgccctggttgcggacaataaaaaaggccggggcgaaaccgcaccgaccttcctattcgcatctcacaccagtgccagtacatccgtggtcaaaagcataaaagcgataccggcaactgcgagcgtccgctgtgtggaacactgaccagcaatgccgatgaaccccatatgggaggtcaatatggcgaattcaagtccgggagtgaaatagctgacaaatggggaccccggtaaacggatgagacggccgcttgtaagcagcaaacgaaaccacctcaaaatccgccctaagccattgaaatgattggcgacccctgcaggattcgaacctgcgaccacctgcttagaaggcaggtgctctatccagctgagctaaggggccacactgccgatgcgccgccggcgcatcgaaggcatggggctctggaaacgatctataccgatcagtgcgtccagggctgcgtgcgcgtatagcggaaattatccggatacgccaccgtctgacgctgcggatctttcggcgcgatcacccggtactcgatgccgttgcgcttggcataggcttcggccagttcctgcgtttcgaaattgagcttcacctgctggcgcatgtccgacgacgaggtgtagcccatgatcgggtcgatcgtgcgcggcgtttcctgatcgaactccagcacccacaggtgagtcttggccttgccggactgcatggcggtctttgctggacgatagatcttggcagacatagctgcacgcctccgaattatggctttcgcaatcaatggactggccccttgcggggcatcttcatgcacgatcgcacggatagatgaattttgcttagcgacgaatccctcccttttcaagcgaaaagccacgcccgctgcatgccaacggtccacagcttcgacacggcccgaacaccttgcccggtgccatcaggcagccagcaaacaggccgggccttgcgtcgtgcgaccaaggcgcctgcgtgacgcggcaaccgagaccttgctgaatgaaccggcaggcgcccatccttgtgaaaaggccattttagttattgcggcgcatgatcgaaccgtgtattgcgctcctcgtcggcacggagtgtagcgcagtctggtagcgcatctggtttgggaccagagggtcgggagttcgaatctctccactccgaccacttttcttcgcggatctcgcgcttcatcccataaaatatgcagatcggcgcctctgaacgccatcgtcgcttcggttattccgatgcggttcagcgcaaccttgtgcacgctccaatctggatatcgtcaaggacagcgctggatcaccaggccgacggccaccggagcgtcgatcagaccgccgtcagatgctcgaaaaggatcgagacgccaaacccgatcaagaccaggccggccacgccctcagcgatgcgcccgaaacgcgcgccgatcaggcgcccgaccagcattccactcgaagagagcaggaacgtcgccgcaccgattgcgatcgcaacgacgaggatgttcacctgcatgaatgcgagcgatacaccgaccgccatcgcgtcgaggctcgtgccgatggcggttgccacgaggatcaggaaggaagagctcttgaccccggccgcatcatcctcgcctccccttgcggcggcgtacagcatgttcaggccgacgaagccgagcagtgcgaaggcgatccaatgatcgacggccgaaatgtaggatgccgcggcaaagcccgccgcccaaccgatcagcggcgtgatcgcctcgacgacgccgaacacgatgccagttcgcagcgcctcactaacgcgcgggcggccaagagcggcgccccgtccgacggacacggcaaacgcgtccatcgacatgctgaaggcgagcaggatgattgcccagtatgacatgaaaattcctcgcggacgtacaggccgggcgtcccaagctctgtccgatccgagctggcgtcgccacggtcttgtcgagccggttaaatccggccaaacgcgccacgtgctgctgcacgagtatgttgacgcgcttccgctgggtggcggtgactactccccgatgcgctggagataatcgagcaggttgatcgagtcaaccttcgcggcaaatttattccgggaattttccgtaataacaatgagttgcaactgcaacaccgccagctcgaatgcgtctgcgaagcgttctcaatggagcatgctcaaaggtcaggagatgaccacgcggccggtgataaaacccagaaccagaatggccaggatcgccaaacgacagagaacgcttaccgtcgcggcgctaggccatgcgaagacaacaagcttgccgccgtcgcccttaccgcgcgacgtctcgtgccgaaggctacgaaccttcatcctcgtcgacagttgaccaaccgaaatcattctcgccaacacctttcagctagcatcaggccagctaccatgaaggcaacatcgcattattgagaatgacttgcaatagcggatgagtccgatttggtcgaccttcgcccgatcacggatatttcaacgcctcaccattgaagctcaagctagttgagatcctacattgctgtcatcaatgacgattggagtcttcaatgggtgatcaacagacaaacggaatgtcctgccctcggtgcggcgtcggccttctgatgacggatcggcaaggaatcgagatcgattactgcccgacctgccggggagtttggctggaccgtggcgagctcgacaagatcatcgagcggagcgccgcgccgcaggctgcagccggaagcgactatcaggataactatcaaggaaaccaccagggcaactaccagggtggtcacggcggccatggaggctattcaagccatggcggccacaacagtcacggacagcgcggcggccacggtggcagatcgttcctgtcgagaatcttcgactgaccgacattttctagcgtgaagctccgtctccctcaggctactccccaagtgacggagccaacgcagaaggaggtccgcggttcagcacgaccgcgggcctcacgacttagttcggaagatgcgtccatttggaccgcacatctgccgcgttcatcgacaggtgaacatgcgcatcgacgtgatcgacccattccagcgggatgaggtggtgatgctgtccatcggacgagtcggatttcgtcagcttgatacggtcactgccatcgaggtgatcgacggttccgacatgctgaccatccgccgacctgacttccatatgatctttgatttcatttgcagcgatcatttccgttctccatgtttgcgggacgaccatcctcaaacctgcagaaccagcgttagttccctctggaattaaagccgctgacgcttttgccactgcatccggcgctctcatgcatatccagcccgctccgcggcaccccgttccggcatgcggcatcgcggcaatccagtgatacactgccgtcggccgccccttgttgggacaaggggcggccgattttttatgaagcgcggctattcctgatgccgctccttactgctcgctgacaccctcttccggaaggttcaggttggcgagcgcctggatgacgtagcaatcgcggatggagccctcatgtcggtgggtggcgatgcgatcgagttcggcctcgagctttctcaagcgttcgatcttgtgcctcaccgtggcgagctgacttgcggcgatccggtcgatctccgaacagggcatatcgggatgctggctcatctcgatcaggtcgcggatcgcttcgatcgtcatgccaagttcgcgcgcatgcctgatgaacgacagccgttcgcgctcctgcttcgtgtaacgccgctggtttccctcggaccgctccgcgtgagacagaagccccatctgctcgtagtaccgaatggtcggaatcttaacgcctgttctccgtgataggtcgccgatcgtcagcatcctgcatctccatatctctagtcgatggagagcgtatgcctcaggcttcctgacgggcacctgaccacattctttatttccagacgcgaaggaatgcttccgtggcaaccgcgatggtgagaattgccatcgcccaaccgctccagagcgcttcctcggtgttatgtccgatgtagttgcacgtcacggagaacgcgagatacatcacggcgatcgccgctccgacgatgacggcaaccaaagcggccttaagcaacatttttcgcctctgcattcatgaatagcaaactagcgatctttccgatcaggcaaaaatcaacattgtttgatgcacgggccgctcgggccagttccaaaaggacttgaagctcaagctccttgaggtcgtacggtccgtgcgatttgcccatcgggaggaatcaaaatgaagcggcgggacgtgttgctgttgcaaccgcttcaatcccgctgatcgttgcgccggcaaccttcgccaccgccaccggtgacgctcggacaaaaccggatgccggtcggcaagacacgagatcaagaagggacaaagtcctttgaagacgaggcaaaaacctcctcccaggacgcgtcttcaagggccaatggtggtgatcttggcttcctcgccgaggatccgatcccaccagagtttatcaaggccgccgccagcgcggcgccaggagaagtcgttgcctccccgcggaggctgtggtgggatccacttgctgaattcgaggagcgacgcggcaaccccgtacccgtgtacgacaaggttccgtgagagattcgacattcgcacgaaggttcggtagcaagggaagtcgcaagtatcctaaaagccaaggccgagatcgaagttcttgacaatggggcttctcagcctgaggcggaatcgggtaccaattacctcggaacaatcacgatcgcgaacgccgcgcggtcttctctgacgtcggccgagaaacggaaagacattgaatgactgagcgcaaaccgcggtcgtggaaacgtttcggcgccttgagcgcaacgattgtcgggctggggctggcattgagcggttgcgttcagcttgccctcgacgaccttggcgccgcctccccggaaatttcgcaaaagacgctcgtcgacataaagaagaagggcatgaccgtgcaggcgccggtcctcgtgcgtcttttcaaggaggaaagcgagctggaagtctggaaacaggacgcatccggccgttacgccctgctgaagacctacccgatatgccggtggtccggaaagctggggccgaagaagaacgatggcgaccgccaggcgcccgaaggcttctattccgtcacgaaaggaatgctgaacccgcagtcgcaatattatctctcgttcaatctcggctatccgaaccgcctggaagcggcgcttggctacaccggaaccgcgttgatggttcatggcgcctgctcgtcgtcaggctgctacgccatgacggaccagggcgtcggcgagatctacgctctggtcaaggcatccctggaggccggacagagcgcgttccaggttcaggcctttccgttcaggatgacggcccagaacatggcttcccatcgggaagatccgaatttcgagttctggcgaaccatgaaagcgggctacgactcgttcgaggcgacgcgcacgcagcctaagatttccacctgcggcgggaagtacgtcgtaaacgcggaattcgaaggcggcgagccaaagaacccgctggcggcctgcccggcgcggatcgacacgctgaaccccgctatcgccgccaaattcaaggtcgaagacacgcagctttcagcgctcgtcgaaaaggacggcccgttgcatgccaatgcctacgtggatggcggcatgcatccaagtttccgggtgcttctgaagcagaacggggcggagaagctcgcagcccggatctcgacgatcaagtaccccgtcagccgcccggaagcggcgctggccgatccctatgacggcgccaagtaatcagtttagttgcaagtagcccaggctacttgacggcggccgcgatgctgttttcgtcgtgagctgagatggcgacccaccgtccggaatcctgttccgactgcctcttgaggaaggtgtagttcgtctcggaccagagcttcacgtcggttgcgagattgtccaacagatagtcgcccttgtcggttctgaccgtcagcacggcgtggccttcgccatcaggctttttcagcacggtaatcaacagattggatgccggaacgcccattcccaaaagtatccgctgcttctcgatagcgtaatcctcgcaatcgccttcgccatcgggaaaggcccagacctcgaccttgccgtagtggtcctcgtcggtcttcggcgccacgcgcgcattcacctcggcgttgaccctgatcaggtcaccccactgcgcctcggtcagcgtcagcggtgcaagatcggttgaacggcggctgcattcttcggcattggccttgcagaactcgaagtgaccgattggttgcgacgtgaacgtccccgtcttcatcaccgtatcgagatcacccgagcccgcgaaagcagttccggcacagccaaccaacgaaaaaacaacagcaaaacccaaacgcaacacgagcaaccctcatcgaccccgccaccagggttaacaaacggtaaaccccaccgaaggtcaaggatcgccattcgaatagttaattgatggttaacgcaaccggccggatggcccgtattctcgcctccgagttcctccaggtgcctcgagtcggctacccctctgaaacgactgttcagcgccctccttgcggaggacgctgacaggccgggatcgatatggagctcaggaccgcggacgcgcggcggttgtcttattaggcagccttgtcgaccgagccgccgctgatcatctcctgctcgacggcgtcgatcgtcggacggtcgctttcggagatggtcttgcggccatactccagggcgacctgaggtaccgatccgttcatgtaggcaagcagcgtctgcttgacgatgacataaagccggtgctgcttcgttctcacggtcttgatctgcgcggtgatcggagcacacagggagtaggacagcagaatccccaggaacgtaccgacgagcgcggcgccgatcagatgcccgagaacctccggcggttcgttgatcgcggccatggccttgataaccccgagaacggcggcgacgatgccgatggccggaaaggagtcgcccatggtcgtcagggcgtgatagggcttgagccggtcgttgaggatcgtattgagttcctcgtccatcagcgcctcgatctcgtgcgatcgagcatttccgatgatgataaggcgaacatagtcgcagatgaaattgaccagcgacttgttcttgagcagcgtcggagcggcttggaagatcggcgactccgcagggttgtcgatatgcgcttcgatttcgttacggctcttggtcctcaggtcgcgcatgagggagtagaggacactcaggacgtccaggtattcccgctccttcgggaccgcgtatttgaaagcctcgccgatcgacttgagcgaatccttgatgactttcatggagttcgccatcacgaagccgccgatgccggcgcccccgatgatgacaagttcgaatggctggaacagggctccgactttgccgcccatggccatgaagctgccgataatgcaccctgtggtgatcaccagtccgataatgatgttcatattctaagctcgtccgttggccgcaccgacagctgactgaatgtctggcctggtgccgcgaatatcgatcaatgtgattcgagatgaggcgactcgaatcggggggcggaacagtgacgtctggttggtcggccgcagcctcgggtgcaaggcctcgaccctgaacccgacaacgacaggccggtttgcctgcaagctataggtcacgacacagttgtgaagcgaacagtgatcgccgtggccggaacgcatactggtgtcggcacgagaaaggtcgacgcccgcggtgggaacggtgaactcgacggtactggcgaaagtctcgatggtgtcggcctgcgaatgaccgaccaaattgcagacaagaatcgtcgcgagaaaaagcaccaccgcggcaactcttctgttcgacgttctacgcatattgtttccagacttttcgatcgtccgattgattgcaccgtgaacttgtccggggcttgtgccgaggctggcacgggcatcattctaagctaggaatgggattgttcgctggaacgcgtcgtccggcacacagcgccatgcggcgcggaacgcgcacaccaaatatattcttgggaacggaggtagttcgtcgcgcccgagcgctagactaggaggcgtcgcggatcatggtcttggcctgcgtgtcggcgacgatacgaagcgcacggatcatctcggccgcatcgagaagcgccctcgcccaatcgcttcgggtgaagcgttccgctctcgtcgccacgttcatcagaacgatgatttcatccgaaggcgttccgcttccgggtatgccgacgaattcgcgctggtcgcggatgcacacgatcgcgcgatggagcagcctcctgacctccggcgggccaagcctttcgacatcgttggccgcgcgaagcaactcggatacaaaagcagacttgtcgttcatacccgtctcctagatgcccggcagatcatggatcgacatgcgcgtctgcttgtctggccctgtcggcccttcgctgaaacctggcacgcaacacgaagggaagaaagaacgcaccgatgatcaacgcccctccgaggaagccaagccagggcgaaatgccgccaagccagaggacgatcgtcggcattgcccagaacagacaaaatgacgcggcgattatcagtacggcggcaacagcggaacggccatcttctctcgtcatcggcattatctcaccaccacgttgtgttaaggctaatagcgcaacattcctgaccggaagctgatagcccgacataatcgcccttctgtcggaactgtcagcaagtcgtcagggtcgccgtgctcaatgcggcgagaaaacggggtgcgaatgaagatattgctcgtagaagatcatgacgctctgggaagcctcgttcaagaacatctgaaccagtccgggttcataatcgatcgagtgcaggatggcccggaagccttggaggctttgcggaccgtcgaatacgatgggatgatcctcgacctcggcctgccgacgctcgatggcctcgatgtactgaaacgccagagaatgcagaagggtcggtcgctgcccgtcatcattctcacagcccgcgaccagatcagcgacagactgaccggcctgaattccggcgccgacgattatctcgtcaaacccttcgatatccttgagctcgaagcgcggctgcgcgccgttctccgccggcccggagcgcggatcgacgaggtgctgacggtcggcaatgtctcggtcgacgtcgcgcggtgggacgtccggatcgatggcaactccgtcgagctcgcccgacgtgaattcgtcctgctggaagaactggcacgcgtctatcccggcgtgatggccaaggaccggctcgaggatcgactttactcattcgacgaaatcgtaacgccaaatgccaccgaggcggtcgtgtcgcgccttcgccgcaaattgatcgccgcccacgccactgctcggatcgccaccgtgcgaggcatcggatatcgcctgctgcccggagaagacgttgaggtggactaaaagccttcgtggcagacttgccgcggcgatggcggtggtgttcaccattggcgcggcggacgtcgttatatacatctgggacgtcgaccaggacttgcgcacccatataatggacaagcagatcgacgcgattctggcgactgtcggaacggatgccggcattgaagctatcggccgcctttcaacccgcttcggagaggcggactggcgcttcgcggtatatgatccaaccggcgccctcctcctgtctcgcccggacgacggccgcccacctccactcctgagtggtggcaaagagctgaaggaagcacgctcctctgtcatctcccgccccctgggtcccaatacgcttgtcgtacgcaaggacgattggcaggaacggcaggaactgcaaacgctgctgcggatggaactcgcgggaagcacctttgttatcgccgccttgggcgcgctctcgtttctcgttgtgctgacgctcgcggcctgggtgcttcggtccgtgaacaaggccgcggctctcgccaggcatattgacgcggacgatcccggcaagcgaataccggtcgacgacctcccgatggaaatacgaccgctcgccgttgcagccaatggcgcgctcgaaaggctcgcccgcgcctatgcatcggaacgccgcttcaccgccgaggcggcccacgaactgcgcacgccgctggccgtattgagtttgcgccttcagaaagctcgcgccgacaacagcgtggactgggaatccatcgatcgcgaaatggggcaaatgactcatctcgttggccagctcaccgccttggcccgcgcggagagccacgcggcgcttccgcctgatcgcgaagtgctttccatgtctcgggtcgtccgcgaagccgtggcggacatgatgcttctgttcgagaatgccgaaagagaagttcacgtcgaggtcgccgacgggctctacacgcgcggcaacagcgggcaaatgagacaggctgttcaaaaccttctggagaacgccctggtgcatggcaccggtcacacgacgattacgttgagtgaagtctcgaccagtttgctgcttgaagtatccgacgaaggttcggcgcctgccttgaacgaggtggaagagctgttcgaccggtttcacaagcgacggcagacggggcccggctctggacttggattggcgatcgttcgacagatcgctcgaaattcggggggcgacgttgccatagcgaccctggacaggttcaccgtcgtgatgaccttgccctcgatcaaggcgagcaccggcagatgatggtgaccacgctcgatgccctgttgccgatcccggtcccagccggttggccggatgccgcggaccgccgcaacgaagaatcgcgtcagcgcccgatggtccaaaaaccacttgtagctcaacctgctagaggccctaaatcacgggtcacggagcccctgatgaaacatgtcgtcttgcatccgttttgccgttggccgcgatcctgatgctgttcaagccaaccggtcccggcatcggcagacgtgacgatccccgccactctcggatgcgagaagccggggaacgccaatgttcaaatcgcggccccaaagtcctggccgacaggcaagactaacaactgagaagcgtaatgaagcgcacaattgctttcgcaattctgataacaacaatgatgacatcggtcgtattcagcgtaatcggcgtcctcgcagtatggaacccgttcacgaatgcctgaccaacagactattgaccaccctaagaaccgcgttggcattcgccttctcatcatggcatccatcgttgcctcggctctggccatcgaccagatcgtcaagttcgtcatggtcgaattcgtgatgcaacctccacgcattatcgaggtcacgtcgttctttgaccttgttctcgtcttcaacagtggcatcagtttcggcatgttcagcggacagatcgggctctatccggtcgtgttcgcctttgcaaagacggcaatcgccaccgccctgatcgtatggggctgcatgacgaactcaaggcgtgaaagacttgcactggccgtgatggccgggggtgccgccggaaacatcgtcgacaggttccgcgatggcgcggtcaccgactatctctcgctgcatgctggtgcatgggcgtggccatcgttcaatctggccgacgtcttcgtggtgacgggtgccatcgcgctggtggcttgctccatggtcaagcagcggccgaaagcggacatttagggagactggaatgaaactcgacgaagaagcagagcgggcacgtcaaaagaccgtcaagcgaagaaatgtgatcgtgctggtcatactgtcgggcttcgccctggcggtgtttacggtcacgttcttccatattccccaggaaggtcgctccgcgtcacgtgccttgggcgaaatccagggccagtgatccgctccaatccgcatgagcggcaggaccggcgtcgtcgggttgaactcctgcgcgggttctcaccgtcggtgactgtaccatctcgcctagcaaatccccgcataagtcatcatcatgcctgacgacgttgatgcggggcccctcctaagaagaggccccgcgcaagcttgaccgccgatcgtgtccgatcacgcggcgatcttgcacgccatgcccgtcaagggcctgtgcttgtcacgcatggaactcgtgaccggcatgttgctcgccttcggcctcgacctggatcgtcgaatgaacgatgccgaacttttcgctgagcatggtctcgacagccttgcgcgcgatggcatggttttcgccgtccttgacggagatgtgcgaggtgaagctgatctggtcgttcgaagtcgaccacaggtgcacgtcgtgtacgtcgacgatgccgggaacgtccttgatcgctttgcggatctcgttcaggctcattccggacggaacaccctccaggagaacgttcgtcgtatcccgcaggagaatccatgtccgtggcagcacccagacgccgatcgccaccgcgaccagcggatcgacccatgtccagcccgtgaacttgattgcgagagcaccggcgacgacgccgacggagccgagcatgtccgcccagacttcgagataggcgcccttgacgttgaagctggcatcgcgcccggaggcaagcagtctcatcgaaatgagattgacgatcagacccagcaccgcgatgatcatcatccccgtggattcgacctgctgcggctcgcggaaccgtcctatggcttcgacgaagacatagatcgccaccacgaagagcagcatcgcgttgaacgtcgcggcgaggatctcaagtcgcctgtatccgaaagtccgccgctcgtcggccggacggtttccgaccttgatggccagaagagcgatcgcgagcgccgcgacgtcggtcatcatgtgcgcggcgtcggacaagagtgcaaggctgttgtagacaatcccgccaacgacttccgccacgaggaaggtcgccgtcagtacaagagccagggtcagcatctttgaattggcgccagccgtgtggtcgtgggcgtggccttctcccgcatcgtgagaatgcgacattcagtagtcctccgttaagtatccggcgcgctcggcggcggcggggtatcgagaagtgtgtcgatgcgcttgcgctctttttgaaaggtgagaagccgatcatccttgagggatgcgtcggttggcaggcggattttgagtgggtcgactcgccgtccgttcaccagcaattcataatgcaggtgcgaaccggtcaccatcccggtagcacctatgtagccgatgacctggccctgcttcaccttgcccccggcgacgacattcttggcgatcgcgctctggtggctgtaggaggagacatatccgttcgcgtggcggatcagggtctggttgccatatccgcccgtatcccatcccgccttgatgacgtcgccgtctcccgcggcaatgatcggcgttcccgtcggcgcggggtagtcgaccccggtatgcatgcgcacgaatccgagaaccggatgtcgacgcatgccaaagctcgaattcggcggaacactcgggaccggactgcgaagcaggaattgacgcaggctttttccattctcgtcgaagtagccgatgctgccgtctacaggatcgcgaaacttgtagaaccgagcctcgcgatcaccgaaacgcacgctgaaatagagaagctccgagttctcctcggcattcccatccttccccgatgaataaaacgcttccaagctgtccgacgatttcagtggcgcctgcaggtcgaaggacgacgccatgataccgacgatcgtcttggccatgccgagcgtcatgccgtagttgagcgcgctcctgtaaatgccgtcatagacctttggcaggtccagaggagccgcccgtccgatcgtcacgcccccttcgccgacggcaccgaaccgctcaggctcggccccggtgacgaacctgccggcatcgtcgacggcgatgctggcctggtgccgctgcgaccggtacaggctcgcccgcacgaccttcagatcctgtccacgctggatgacgcccatgcggaccgtatcaccgacatcgacgttctggcccgcgccggcagcaagcaggtttccgaccattcccgcctgcccggccggatagccggcggatttcagggcctcggttacggtggtttttccgccgacattgatcacgtcctcggcgaactgttccgtgttggccgtgatcgccgcaaccgtcgaataggagacattctgctcgagcaccttcgcggtgctgcccatgggcggcagatcgtcgttatcggagaagcgctcgggatcgacatagaccgccgagacggtcgccccttccagaagcgccatgccatcggagcggacggaggcctcgatctcctcgaagctcattcccggcgccaccggccacttgccggaagccgagtagctgcctgtcttcaaggctatctcggtctcgaccttcgcgccgtaaagcgctccctcctcggacggttcagcctcgcctcccgagacccccgagagaaccgccgtcgggtcgaacttgggataattcgttcccgaggcgccaccggcggccaactgcatctggacgtgggtataaggctgacttctgacgacctcgcgatcgccttccttgacgatcgaagagagctccatgaccctgcgatcggaagcgcgcgcggccttcagcgtcccgacgattctggccccgcgcagcacgctttcgtcggcatggctcgcttccgtgggcaggctgacggcttccgcgggtgtcgctagctgctgtctgccgtccattgccgcgaatagcgcgacccccatcaacagggtcgacgtcgctcccgtgagcgcgatgcccgtcagccaccggctcgacacctgtctgcggtcgggctggcgtcgcccgtccgcggggatcgcggcagcgtttccgagagatctttggatcgcttctttgttcaccacatgccgtctcaattacgggattgtaccggcttcgggcacggtccgcgcaaaggttaatctcgaactgcccgcctactggcggacaatgacgcgcgccttgatcggaacgcgcgtatacaaatcgatcacgtcctggttcaaaagtcgaacacatcctgacgatacggccttgccgatcgaccgccaatcattggtaccgtggaggcgatagagcgtgtccttgccgtcggagaaaatgtagagagcgcgagcgccgagcggattgtcgatgccgccttccattcccccgttctcgatcgaatatttcgcgagttcgggctggcgagcgaccatctcattcggcggcttccagcgcggccacttttgacgccactgtatcactccctcacctgcccatgcgaaaccttcgcggccgataccgacaccgtaacgcatcgcggtgccacccggctcaacgacgtataggaatctggccggggtatcaacgattaccgttccaggcgcctctcccgtcgggtccatgacgcgttgccggtagaacctggggtcgatcttgtcatagggaacggcggccatcgtctgattttcatcgacggcctccgcgtacatcgacgcgagatcggccgggctcggtggtccgacgggacggctggctcgcggttgttcgaaagggatcggcaccgtcttcggcagcccgccggtcgcacaacctgcaagctgcgtcgccccgatcatggcggagaaagccatcaagcggcggcgtgtcaaaacgaccgatttggccatgcggggtcattctccgtggaattcaatgtgcgcggaaccgaaagacgtagaaggctccggcgcccagatgggcgccggagccgttatccgacaagtcgatgtcagccgtccttcggcaccttaagcaggcgcaaggcgttcatcgtgacgagcaccgtggcaccggtatcggcgagaattgccggccacaagcccgtgaggccgatgacggtcgtgaccaggaaaacagccttcagcgcgagcgacatgaagatgttctggtagatgtttcgcatcgtccgcttggacagatcgatcatcctgaaaatgtccgacacgcgaccatgaagaatggcggcatcggccgtttcaagcgccacgtcggtgcccccgcccatggcgataccaacgtttgccgcggccagagccggagcgtcgttgataccatcgccaaccttggcgaccacgaggccgagcttctgcatctcgccgacgatcttctgcttgtcttccggcaggagctgggccttcaccgaaatgcccagttgcttgccgatcgccgaagcggtccggttgttgtcgccggtcagcatgacggtcttcacgccgatctgttccaactgcttcaaaccatcacgagcatcggcccgcggttcgtcacgcatggcgatcgcgccggcgagctttccgcccacgatgaggaccgacacggtcttgccttcgtcgttgagcttggtgatcgtcgcctgctgctcatccgagaggccgacacggtccgcggcagccgccggcgagccgaagaatacgtcgtggctttcgaccgttgccgtaacccccttgccgccgatcgccttcgcatcgatcgcagcaggaatgttgacttgatcctcctcggccttcttcagaatggcgatggcgagcggatggcttgagccggtctcgagcgcggccgacattctgagcacctcggaaggagccatgccgaaatcgaggatgtcggtaaccttcggcttgccttcggtaagcgtacccgtcttgtcgagggcgaccgcggtgatcttgccaagggtctcgagcacggctccgcccttcatcagcagtccgcgacgtgcacccgacgacagcgatgcagcgatcgcggcaggcgtcgaaatgaccagggcgcacgggcacccgatcagaagcagcgccagtcccttgtagatccactcgttccagtcaccgccagcaaggagaggcggcagggtcgcgaccagagcagccacgacgacgacaccaggggtgtaatagaaagagaagcggtcgatgaaccgttcggtcggagccttggattcctgagcctcttccaccagcttgacgacgcgagcgatcgtgttgtcggcggcagcggccgtaacccgaacgcgcagggcggcatcaccgttgacggtgcccgcgaataccttgtcgtccacgccctttctcaccggcacgctctcaccggtcacgggcgcttcgtcgatcgaactctcgccggcaatgatcacgccgtcggcggacacgcggtcaccggggcggaccaggatgatcgcgtccacctcgacatcctcggccggaacttcgcgcgtgcgtccgttctcttcgaccagcgccatctttggcacgaggttggccagcgactggatgctcgcacgggccttgcccgccgcgacaccctcgagaagttcgcctacgaggaacaggaagacaaccgcggcggcttcctcgctcgcgtcgatgatgaccgctccagcagcggcgatcgtcatcagcatttcgatggagaacggcgtacccgcgcgggcagccatgaacgcgcggcgagcgatcggcatcaggccgacgagcatcgccacgacgaaggcgtaggaaccggtctgcgggaacaggtggccaatgccataggccgcgaccagcgccgcgcccgccatgatcgtcaggcgacccttgcggcttttccaccatggtccattcgtcggtccatggtcatggccatgcagccctgaggtttcactgccatgggaatgcccgtcacggctcccgccggccttggccggttgcgccgcttcgatcgaatagccgagaccacgcacctgcttttcgatcgcgggaacgtcgatggcatccttgtggcgaacggtcatcgtacccgcggtgacggagacggacaccgtgtcgacgccgctgagacggcggacggcggtatcgatcttcgccgcgcaggacgcgcagtccatgccgccgatgcgaaagcgtgtcatgccctgatccgggccaacgttgccgtccgccttttcatgatcatggtcgtgaccggaatggtcgtggccggaatggtcgtggccagagtgatcatggccggaatggtcgtgtccggcgtgatcgtggtcatgcttgtgatcggagtggtcgtgatcgtggccgcaagacgcgtggtcgtggccggcatgatcatggccagcgtgatcgtggtcaccatgcttgtgaccagcatgatcgtggtcatggccgcaggacgcgtggtcgtgacccgcgtgatcgtggtccttatggtcatgacccgagtgatcgtgacccttgtggtcgtggccggaatgatcgtggcccttgtggtcgtggccagagtggtcatggtccttgtgatcatggccggcgtgatcatggccggcgtggtcatggcctgcgtgatcgtgtttctcgtgcttgtgctcggccttggcggcggccgccggcttggctggcgtcgaaatacgggaaaccggatagccgaggccactgaccttcttttcgattttcgcgagatcggcagagagaagatgactaatggtcatcgtccccgcggtcacggaaaccgatacatcctcgatgcctgttgagcgccttacggcggtgtcgattttggatgcgcaagaggcgcaatccataccgctcacccggtacttggtcttgatgatttcattcattgcggtaaacctcgatagcttcgagatatgtacctacaacctcatgtcactataggttcaagtggaaaaaaacggcttggaaagaaactcgtaatcgatggttttcgcgagcattccaatccgcttcgacaaggtcggcgcttgaaatatcctatccagggggataggttgtggacatggaagaacatcggcacgaaactcatcccgacatcgtcaatcggctcaagcgggccgaaggacatctgaaaagcgtgatcgccatgatcgagggcggacggccatgcctcgacatcgctcagcaactccacgccgtggagaaggcgatcatcaacgccaagcgaacattgatccaggatcacctcgatcattgcctcgaggacacgatcggggttctcccccgcgatcagcgccagtcgatcgacgagttcaaggccatcaccaagtacctttgagcataacgggatcgaacatgctgaacgtcctcgcaaaccgcacctaccgtcatctgtttctcgcccaggtcatcgcgctggtcgggaccgggctcgccacggtggcgctcggcctcctggcctacagtctcgccggcgccgatgcgggcgcggttctcgggacggccctggcgatcaagatgatcgcctatgtcggcgttgcgccggtcgcggccgccttcgccgagcggctgcccaggcgcacgatgctggtgtctctcgacctcatccgggcggcggtggcgctactgctgccctttgtcaccgaggtctggcaggtctatgtcctcattttcgtgcttcagtcggcatcggcggccttcacgccgacctttcaggccaccatccccgacgtgcttcccgaagaaaaggagtatacgcgggcgctctcgctctcgcgtctcgcctacgatctggagagtgtcgtcagtccgatgctggcggcggccttgctgacggtcatcagtttccacagcctcttcgccggaaccgtcatcggcttcctcgcctcggccgcgctcgtcgtctccgttgtccttccctcccccaaggccagcgagcggcgcggcatctacgacaggacgacccggggcctgcgcatctatctggcgacgcctcgcctcaggggtctgctcgccatcaaccttgccgtcgcggcggcaagcgcgatggtgatcgtcaacaccgtggttctggtacaggcggagttctccctgacgcagagggcgacggcattggcgctggcggccttcggcggcggctccatgctcgcggcgctggctcttccgcgattgctcgatcgcctgcccgaccgacaggcaatgctttgcggcgcggcgatcctcgtccttggggtcggccttggaatgttcgtggggagctacgcgatgctgctccccttgtggttcgccctcggcatcggctactcgctggcccagaccccgtccggccgactgctgcgccggtcgtcccggcccgaggaccggccggcgcttttcgccgcgcagttcgcgctctcccacgcctgctggctgatcacctatccgatcgcgggctggctcggcgcgcgcgccggtcttcccttcaccttcgcatcgctctcactgctcggcgcggtcgccgtgctgatcgccgtccgggtgtggccggcggacgatccgcaggaactggaacacacccacggcgatctggacgccaaccatccgcacatcgctggtgccgaacgcttcgtcggcggccaccgtcattctcatgcctatgtgatcgacaacgaccacacgcaatggccgcgcgcgggatgagtatcttggcgcccatgccaggccggcctcgatagaccccgcttccacactttatatacgggcataaacaggccggcatcgaagcagcggcgccccgtccagcccggccccgcgaaccgtgctctagaagaccacccgatgtggatgcgtgaagatctcgaaatcctctccgcgcgcgacggcgatcatggtgatccccgcctcctcggccgtgcgaatggcataggcggtcggcgccgagatcgcgatcaggatcgggctgccgagaaacccggccttctggatcatctcgatcgaaagccggctggtcaccgtcaccgcgccgctgccgccggagacacccgatgcgacgacggcgccgcagagcttgtcgagcgcgttgtgccggccgacgtcctcgcgcaacgccaccagcccgctgcccggcacgaagaacccggcgccatgcaccgcgcgggtcttgtggttgagttgctgctgatccgcgaggctcgccaccgcgcgcgcgatgtcgtgaggcgtgaccgtgagatcgcgggacaggacgggacgcacactgcggacggcctgctccagcgattcgataccgcacaggccgcagccgaccggacccatcatgtgtcgccggcgcgcgcgcagcttctcctcgacgtcttcaaccagcgcgatctgcacgtcgatgcccatctcgtcctgaacgatctcgatcgcctcgatctgcgagacggcgtcgatcaaaccctcggtaaggctgaagccgaccgcgaaatcgaccagatcggcgggcgtcgccatcatcaccgcatgcgagctgccgccataggagaaagcgatcgccacctcctcgggaacgctgcgcgtcgccggtgcggcaaccccaccatgaaaggcgatggtgtgcacggcctcgtggctcgctcggttatcgacgaaactgatattcaccctgctcttccctgaacgacgcggcccagcccgcgaatgcgcctgccaatctccactataggcccggaccgacacgtctgtccccgtgaaagaacggtgcttctcacgcaaaacgccaggtctttcgacctggcgccgcgaagacgtggctgtgttttcaagccgcggaggattgccgcttcggcaacttccagccgggacggacgaagtggcaggtatagccgttcggaatccgttccagatagtcctgatgctcgggctccgcctcccagaaatcgccgaccggggcaagctccgtgacgacctttcccggccagagaccagatgcgtccacatcggcgatcgtatcctcggccacgcgcttctgctcatcactcgcgtagaagatggccgagcggtagctggggccgagatcgttgccctggcgattgggcgtcgacggatcgtggatctggaagaagaattccaggatgtcgcgatagctggtcttggcgggatcgaagaggatctcgatcgcctcggcgtggttcccgtgattgcggtaggtcgcgttggcaacctcaccgccggtgtagcccactcgcgtcgtctcgacacccggcaggcgtctgatcagatcctgcattccccagaaacaaccgcctgcgagcactgcgcgttcgatagtcatcgaatatctccattccctgacgttcgttacgaaatcttcatcggctgacagcctggaagcttgcgcccaacctgcccgagccgcccggaaggcagctccgccgtgtgccctacagatagggattcccggccgtgtttgccagtgcgacattatcggggccgaaatgcctggcaatgtcatatcagtacccagacaatcagcgatacctgatgagcggcaatgtccaaccaattgattttactttgacggcctcagcctctagggaagcatcagtggttgcgtcgtgcggacgcgatgaccaagcgtgagctgcatcacgttacgtgaaccgcagggacgtcttattcttcatatccacttttccatatccaccaggcaatttgaaaaacgagatcacaatgaccgacgaaccaatcgtaagagacagcaacggcgcgcagctcagcgacggtgattccgtcacgctcatcaaggacctgaaggtcaagggcacatcggagaccatcaagcgcggaacgttggtgaagaacatccggctcaacggaaacccaggcgaagtggaatgcaacaccaagcaggtcaagggcctggtgctgaagacggagttcgtcaaaaaggcgtaggtcgccgcgacatccgtgccggatcgaaacaccggacccggatcaacgtggcgacgaacgccggcgccacccgctatgagcgccttgcccggcgctcatcactgcgcactctggctcgtcctggcgacaatgccggacgggcctttttcatgaggaaacgggaaacggccgccctgccggtggctacatgtatttcgtgatgctcgggctgaccaccctgtcgcccggcttgatgccgagcttggccgtggcgccggcgttgagctccagcacgtacttcacctcggtcacggaatcgatgatgtcgcgggaatagggcaccgcattctgcttgatgccacgcacgatacccgcccgatcgacgaacagcatgtcgagcggcagcaccgtgttttccatccacatctgcacacgtcgcgacgtcccgaagtcgaagatcatgccggcatccgcggccatctccttgcggtacatcaggccgcgctgtcgctgctcgttggtatcggcgatctcgacggtaaagttgtatttctgcccggatgccgtctggatgaccagttgctccttatcgaacttgacgacggactgggcgagcgccggcagcgccagcatgaaaaaaagcgccaaaaaggcgcttctgatccggtatgaaaccatggtcatcagtgcgccctgctcacgggggtcggcgcgtccggatggatttcggccgccatcagccccttgtcgccatcgccgaagcgcacgagcacaacctggccgggacgaagctcggtaaggccgaagcgacgcagcgtttccatgtgcacgaagatatcctcggtcccctcgccgcgcgtcaggaagccgaagcccttggtgcggttgaaccacttgaccagcgcgcgctccagaccgctcgtcgccgtgacctgcacatgcgtgcgcaccggcggcagctgcgacggatgaaccgccgtcgactggtccatggagaggatcttgaacgcctggtatccgcgatcccggcgctggatgagagcgacgatgcgggtgccttcgaggatggtctggtagccgtcgcggcgcaggcaggtcacgtgcagcaggacgtcctgcatgccgttgtccgggacgatgaaaccgaagcctttcgcgacgtcgaaccacttcacgacgccggtgatttcgatgaggtcgaccgcatcacccgcgagttgatcgaggtcagtgaattccgtcgatgaaatcctgtcagccatttcgccagcccctcaatacgcgtcacactgttacggttaactgattcttgagatcaagattaacatgttggtaacggattagcgcaagccctacttttcgtttattcgcaactgccaatcttaccccctagtcttgcctgaacctgacgttccgccacagaagaggcacgccagtatttagagaggaaacagaatgcgttatctccacaccatggtccgcgtgaaggatctggatgcatcgctccatttctacgcgacgcttttcgggctcgaggaaacccgccgcatcgacaacgaaaagggtcggtttaccctcgttttcctcgccgcccccggcgacaaggccgacgccaccgccaagggcgcgccatgcctggaactgacctacaactgggaccccgaggactacaccggcggacgcaacttcggccacctcgcctacgaggtcgacgacatctacgcgacctgccagaagctgatggacaacggcatcaccatcaaccgcccgccgcgcgacggacacatggccttcgtacgctctcccgacggcatctcgatcgagattctgcagaagggcggcagcctacaggcggccgagccatgggcatcgatgggcaacaccggcgcctggtaagccgaggcttttgcgaggcttgcggctttttcgatttccggccactgcgtccggatcgtccttgccgcgcaactttgctgcgggcaatctccagatgactcgaggcggatcgtgcgttctgcgctcccctcgccttgatatttggagaatgctcgcttgctcgctgttgaaatgcgcacgcccgtcagggcggcacttctgatcgccgcctccgcatgggcgctgtcgggctgcgtgtccaacaagcccgccgtcgatgcgctcgcctccgccgccgccgaatccgtacccgcgcaagagcagcaggcggcggcaagcgccgcgccgatggccgcttccgcgcaacagcaggccggctaccgcgaccccaggatgaccaatgtctccgggatgacgaacgtctccggaatggagaatgcccctggcgcgcaagccgccggaatggcgcaggcaccgggccagccgacatcggcgatgccggagcagacggcccccgccaatatcggcggcctcgcgatgcaatcgaccggcatcaacgcccaggcgatgagcatcttctcggtcaagcagaggatccagaacaacccgacatcgaccacgctgcagccgtcgggcggcatcggcgccacgcgctcgagcgtctattccagccagatgccggtcgacccggcgccacagcagccgacactcgcaccgcagcagtcctcgcaaaacaccagcaccacgatcgacccggtgcaaacagcctttttggcgacgagcgcccttcccggccagagcatgaatgcgctctacagcgcgcccaggcagaatctgctcaccagcctctccggcctgctgcagaaggcgtccctccccggcgcgacccgcgtcgcgccgaacggattgcggctgcagaacgacaaggtcgaggtcggctgtttcaagccggatctcttgaaggtgatcaaggcggtcgaaggccgtttcggcaggccggcgaccatcacgtcgggctatcgcgaccccgagcgcaaccgcatggtcggcggcgccgaggaatcgatgcacatgagctgcgaggcggccgattttcagatcgatggcgtgtcgaagtgggatatcgccaactatatccgctcgcttcccgaccgcggcggcgtcggcacctattgccacaccgactccatccatctcgacacgggccgcaaccgcgactggaactggggttgcggccgcaagccggcaaccgccacgctcgcccgcgccctctgatatcatcctcgcatttcgctcatcgccgcccggtgccgccacggcaacgggtggcgcgcgcgtttagacgtttgatttcaaggcaatagcgaggtttttccacacgctgacatttcttgtcatttttttgcaaaaatcccttcttgccgcttgcgggaatccgagtgcctgattataagggcgccaccacgaaggaagcgcccttcgtctatcggttaggacaccagattttcattctgggaagaggggttcgactcccctagggcgtgccatcgtggttgatttcattagattttttgattttcgaccggagtgatcctgaacaactggatcgctcggtcgcgatgccatttggcacaaaccggccatccgtctatttcggctatcaggcccaaagcgcatttccaggccaaagcccaacggcgcgacccgtcagactttcccggcagccacttcctcaacgatggcgtcgatatcggagagcacgtcgcgcagataggcaatctcggcgcgtagccgatgcccgccatgcttgagcgcagcgcgcttcgttatgccgatatagggaaaggcccactcttctatgcgagttgcctcggcaagctgcgcctccagcgccgcaagccgctgttcgagcaggcccggaagtttccgggcgctgcctggatcaagccgcaccagcgccaaatcgaatggatcgtgcttgtaccagatgtcggacaaaccggcatggcgcagatcagccaatattctgcgaccctcgtccgtaatatcgtagatctgcctgaccggacggttaccgtctttttcctcgccgacctgtttgagaagcccttccccggcgagacgcgtcatcgccccatagacagcgccgaccgaaatgtcggtccaaagagaaacatgcctctgctcagcctcgaggcgcagccgatggccatgcatcgggccaaccagatcaaaggacgacaggataaacaaacgaattgacgacatgctgctctccatatactcctgcgagagtaatctcgtggaactataactcaccatggcttatgaaaggataaacgctgtgaaagaaagcggtaacacgatcctcgttacaggaggcggctctggcatcggaagggcactcgctcagcgctggcatgatgcaggcaatcaggtcatcgtcaccggtcggcgtcgcgatatgctggaggaaacgatacgcggccggcacgacatggtgttgcgggagcttgatattgacgagcccgacgcaattgagatagcctgcggagagatcacggcttcgttcccggacctcaacgtgctcgtcaacaacgcaggcatctatagcgccgaaaacccgaggcggaagcgcgatctgaaagatgccgagagcatgatcgtcacgaatgtgctcggcccgatcaggctcacgaatgcgctcattgatcacctcgcggcgcgcaaggatgcggcgatcctcaacatttcctctggcaccgcgtttgtgccctatccggcgtcgcccacctacagcgcgacgaaagcggcaatccattcctacaccgccgcgatccgtcccttgctgaagggtcgcgtcgaagtgatcgagatcgtgccgccgcaggtgcagaccgagcttacacctggacagtcggaggacccgaactcgatgccgctcgcagaattcgccgacgaggtcatggctctgctccacggcacatctccgtcgccagccgaagtatgcgtggaacgtgtccgcatgtttcgcaacgctgaacgcgagggccggttcgacgacgtactggatatgatggtccaatatacgccgggtgtttgaaaggatggatattgcgatccggcttcgaacaccgctacccgaaacagtatgggcactgtccgcaattgggtcaaagccgtcgaccaaccgcgcgcccatcaaaccccgctgatcaactcgatcttcgacccatcgctgaaccgtgacagccggaacgccttggggtcgacgatcggcgccctgcccgtcacgatatcggccatcagccgcccggcggccgggccgatgccgaagccgtggccggaaaagccggtcgcgatgtgaaagccgggaatggcctcgacatcggagatgacaggcacggcatcgggcgtcacgtcgatatagcctgcccagcgctgcgcgatctcggccttttcgaagacgggaaacgcggccttcaggtccgccagcgccttgtcctgcttgcgcttggagggaatggggtcgagcaccctgttatattcgaaggggctcgcctcatcgagcgaccactggcgcgggatgcgggcttcgtcgaggaaacgcaggccaagccggaaggcgagcgccttccactcggacctgagcgccggcagaaaatccctggcatgacgaaacgacgccggcacgatgtcgacgatattgtcgtagcccgacgcaaccgtatatccgccgtcctggcgcttgcggatggcgaagtcgttggcccagatcgtctgctccggcccaccctcgagcggcttcgtcctgagcacactgttcatcaccttcaactgcggaagatcgatcccgaagcgccccgaaaacaggctggaccaggccccgccggccagcaccacggcctggcaggcgatcggcccgcgttccgtcaccacgccgcgtacggcgccggcggccagttcgatcccgcgcaccgcgcatgcggtgaggatcgtggcgcccttgtcgcgcgcggcttcggcgatcgcaggtgctgccttctgcggctcggcgcggccgtcggccggtgtgtagagcgcgccggccatgggtaacctcgatccgggaaagagatcgcggaactcgcgcgccctcagcatcctggtgtcgatctggtagtcgcggaggttggcgcgccagcggtcgtgatccgacagctccttctcgttggcgcaggtaaagatgatgccggcgcgcttgaagccagtatcgcggccagtgcgggcgtcgagcgtatcccacagacgcagcgcttcggccatgagcggcacctcgcgcggatcgcgcatcgagatgcgcacccagccccagttgcggctggactgctcctgcccgatcccgcccttctcgcacaagacgaccttcagcccacgctcggcgagctccagcgccgtcgagcagccgacgatcccgccgccgatcaccacgacatcgcaggcatcgggaagcgtttcatcaccgtgaacgggaacgacatggggaccgggcataagggatctcgcggatggtagttgtcttgcgagatggtctagcgcccgcaacacgcgctagaaacagcaaatccgccacaagcgcgaatttgccgcggataagaacaacttacgacgagcgaggggcagagcaacgcccgccgcgaccgccaaacgccccccagttatttcaatggaaacgcaaacacgtccaccggttcgccaagcccgcgcagcggaaacgcgcccaggctgtccatctcgtcttcctggcccgccatctccacgaaagccctggagagaagcaccggccgcttgatctccttcgtcaggctctccagccgcgaagcgacattcaccgccggaccgatcacggtaaaatcgagccgccggcgcgatccgatattgccgtacatcacctctccgacgtgcacgccgatcccataacgaagaacctcgcggcccttgcgcttgttctcggcgttcagctcgaccatcagcgcttccgcggtcttgatcgcctgcagcaggttttcgcaggcctcggggttgctgagcgggaagatcgccagcatgccgtcgcccatgaatttcaggatctcgccgccatgcttctcgatcggctccgacatcgcgtcgaaatagccgttgaggagctcgatcacgtcgtcacgcggccagtggtcggaaatcgtcgtgaaatcgcgaaggtcgcagatcaggatggcggcctccacggtcgcgccgctgccgcgcgtcgtcgccccggccaggatctgctcgctggcatgcggtcccacataggtctgcaacagcgtgcgcgccatgatgttcttcagccggatttcggtcaccagcgtcagcgccggcagcaggtccttgagataattgacatgctcttccagaaacccgccgggacgatcgcttgcgaaggtcacgatatggcgcttgcccagcgtatgctccatcggccaggcgatatattcggtcacgccctcgcgcttgaggtcgtcatagaattcgacgtgcccgtcgccgggacgcagcgcctcgatatccttgcgcacctcggtcgcgccgctgaagatttcgttgacggggcttcgcaggaactgcggcgtgttttcggtgccgtagtcgaaggtggtgatcttcgcctcggtcatccccgtcctccagagaagccgcgcgcccagccattgcggatgatgcgtccggaaatgcatcgtggcgcggctgacgggaatgccctcgtcgcgcagccggtcgcagagctggaccagcagattgtcgatatagcgctcgttgcgcgtctcgttgaccagccagtcgaggctggtcgtccggtgcctcggccactggccgacgctcagctcggaaggctctggagccgggtttgataaggattgcatcgccctacactccgcgagagatcgcggccttctcaacatgaaaacaaaaaatcattcctacgccagctaaatggggtggccgatcgtggaatggaatgcctgcttggcaacatctggcggaaaaagttttattcggcccgattgatcagcccagcagccgccgcgtctgctcgatcgtttgcgcactcggccgtgtcggccgatactccagtccaagagcgccgcgatagccctgcgccacgagccagtcggcgcgcgctttcagatcgatcgagccgctgcccggctcgttgcggccgggatgatcggcgacatgaacgtggaagaccttgtcgatatcgccaccgatcaccgtggccgtctcctcgcccatgacggcggagtggtagatatcgtagatgatcccgatctccttcctccccgtctccctggcgatatcgagcccttcccgggtcgaaccgaggaaatagccgacatgatcgatcagcgtgttcaagggctcgacgccgaggcgaacgccgctgtcggcgagcgtttcgccggcgcgcatcagcgtttcggtgagcgccgcccgctgctcctcgcgggtcttgccggcgaggtcgtcgcccgcctgcgcgatcaacgtcttcgcgccaagccgccgcgccacctcgatcgaccgtttcagcccctcgagaaacgccgcctggttggcgcggtccgtcagcgcgatcatcggctccgcgacaaagctcgcgagctcgatcccggtctcgttcagcgcccattcgaggctgccgatgtccttgttggtccaccgccagaattcgacggcctcgacaccgtgacgatgggcgagcctgatacgatcggcaaaagtctcggcttcatcggcgaaaagccattcgatacaggcagacagcttcatgacatcccacttcgtttcggcaaggcaaacgacacgtgccgctcgatgatcgcgatcgaacggcaggtaagtgcctgactgtaagcgcgccggcccatcggcgccagcactagacttcctagcgtgaaattacaaaccacagcgatagttttcacgcaaaatacacgcatcgtgtttattttggattgtatcggcaaaatcccaaactaggatattgccagcgccgatctgcgcataccacctggagacaccaatgcagctcgcgccgcagcaccgaatctatgtctgcttcttcctgttcgccgtatcgatgggcgccctgcttgcgcgcctgccggacctgcagcaggcgctcggcgtcgatcgctcgcaactggggctgacgctgatcggcgcggccgtgggggcgctgacggcgctgaccttcgcctcccccatcatcgagcgtctcggcgcccgcacgacggccttcatcaccgtgctcggcacatcggcgctgatcgcgacggtgccgtggatggcaagcgcgccgctggtcttctgcatcctcattctcgagggattgctggccggctcgctggaaatcaacctcaatgtcgagatcgaccgtatcgaggcgcagctcggccgcggtgtgatgaaccgggcgcacggcttctggagcctcggcttcttcctcaccgcgctcgttgcatcgggcattcgccaggcgggcgtgccgatgtatatccatctcggcctgaccttcaccttcgttctcatcgtcggaacatgggtgatctcgggcatgcgcaacgcgccggcgcgcgtcacgcaccacgaggaagcgaaggcgccgttgatcgcgctgccgacgatgagcctgctgccgctgtgcggcatcggtgtcgccgccttcctgatcgagggcgccggcatcgactggtcggcgatctacatgcgcgacgtcttcaattcagaaccctttatcggcggactgggcctcacctcgttcaccttcttcatggcggccacccgcctgctcgtcgacccgcaggtcgatcgttttggcgcgcgcgcggtggcgacggtgctgctggtgctcgcggcggccggcgtcattgccgtctgggccgccccgcatcccttcgtggcgctgctcggcttcggcctgatgggcgccggctgcagcgccgtctatccgctcagcgtctcggcggccgcgcagcgcaccgaccgcccctcccacgtcaacgtcgcggccgtcgcgcagatgtccttcgtggtcttcttcctggcgccacctctgctcggcttcatcgccgaccatgcgggcatgcgcatcgcctatctcatctgcctgccgctgatcatctacgcgctgctgtcgatcaaatcgctgcccagccgcagacgcgccgaccagccgaccgatgcgagcgcgggaagcgcggcctaaataacgacggcaaactcgaaaaaagaattttcgcgaccgccgatggcgttcgcgagggcaccgcgaatcgttgagccggcaaatcatgcactgcgcaaaaaatcccgattcgaatcggtctggaacatgcttttcagcatgacccggcacgcgcgaccgttgtgattcgcgcggctgaaccaagatcaaaaaacgtcggataaagtgcaggccccgcctcaccggcggcactcgcctgagcgagtgttgcatctgcaatactttgatttctttgagagaatggtgggtgatgtagggctcgaacctacgacccgctgattaagagtcagctgctctaccaactgagctaatcacccgtccgcgctgtgttgcgtggtgtgagagggcgtataaacaggatcgttcagcttgtctagcgcccttccgaaaattctttcgacaaacgcgatttttttgtgcgttgccgaaatccaatgaaatcaaaggtccagtgtaccggtcgcgagcctcaccgcctggccgccgatccgggcgttcgagatcgccccgccttcgacatccatatgcaggtggataaaggacgggcgccccatctccacgccctgctcgatcatgacgtcgtgatgaccatccggcagccggtcaaaatggtggatggcacctgacagtgccgccgccgccgatcccgtcgccgggtcctcgacgatccccatgccgctcgcgaacatccgcgtatggaatttcgcgacgtggttcacgccaccacggcagtagatataggcggaggccagcgccccgtcgacgaaaggcacggtcgcttcccaaagctgggggtcgaagtccagccgctcggccacgccgatgtcgcgcaccggcaccagaaggaacggcacgcccgccgaccacagcgagggaacgtgattctcgaaaccgatctcgctcgtcttcagcgacagcgccttgccgatgccgatccggtcgagcggcatggcgatctgctgcgatttgcgcggcaggtcgaattccgcgaagctcgcctcaccctcattcagccgcaccgcgcagcgcaccggcccgatgttttcctccagcaccgagaccagatcgatggtcgaaccgccatggatgcgctccgcgagcgcgatcgcggttccaaccgtcggatgcccggcgaagggcagctcccggcccggcgtgaagatgcggatcttggcgacatgggcgggattgccggatgcctgcacgaagaccgtctcggaaaggttcaattccttggcgatcgattgcatcgcctcgtcgctcagatcgtcgccatcgaagatgaccgccagcgggttgcccgtcagcttgcgattggtgaacacgtcatagacgctgtagctgcgcgccacatcggcctccttgtatcgatcctcgttgcgccaacctgcccgaccgcttgagcgagcgcaaggcgttaggtgagcgaagacttatggaagtaccagtcgatgacgggcagcatcgcgaagttataggaataggcttccggatcagccgaacggatggcgacggcgcccgcgatttccttgtcctcggcaacctgcatgtgcgcgtggatcctctcgacgatctcgtcggccgtcaggtcgaatcggtacatcttgagcacggtgacggtgcgtcggtgataggtcgcgaaatatccgtcgcccgcctttgcgtcgcgaaggtcgaaaccggtttcctccagcacctcgcggcgcatgttgtattccaggtcgcagcgcccgtcgaaaatatcatccggctccagcgacccggccgcgaaatagacctgcccgggattggccgtatgcgcgcccatgcggatcgccaccagcgcgccgtcgctgctttcgatgacgggataggcgaagagatggataccaccctgccgctccggttgccgccgccaatacatgaaggtggaaaagggaatgacatgcccctcgcccgcaagcccttccgccgtcagcgccagccgctgctggaaaaccatccggccatcgaacagatgcggattggcctccgtttcgctgacccagttctcggtgatcgcatcgccattcgcgctgtaaaacggatggtcatcaggcagaaccctgagatcgacccccgcgatcggaaacaccgtgcgcggctccggccagccggcgaaatcctctgaaaagtccatctcaaatcccctcatgtcaaatcgagttccatgacgacggggcaatggtccgacgccttcggccgatcccagccggtgcggggataacgctcgacctcctggcccggcggaaacaccgtgcgaaagggctggccgctgcgaatgatctccggcagccgccccgcattggtcttagccagcgccggcgacagccagatgtaatcgagctggcacagccactgctcctccggcccacgcgcgtgatagagcgtccagcggtcgagcggatcgcggcggcgcaccacgttctccgcgaatccgtcgcggctgaattcgtcgagcgcgctttcgctttcgtcctcgtgtttgaacgaataccccgtccgccgccgcccgatcacatcgacgcgctcctgatagtcgttcatgtcgccgcagatgacgaagcgcttgtcgtctgtgtttcccgcgccgaaccggccttcgatgatccggcgcacggcactcgcctcggcgcggcggatcggcatcgtgtagcgccgcccgtccaggccctcgcgcggcccgcccatcgacttgaaatgcacgacgtagagcgtcaccggcacgccgccgatcctgagatcgagctccagacaatcgcgcttgaagatcttgtcgtcgatacgggcgttctgggcgagatcgtcgttgaagagattaagatcgcgataggtggtcatcgcatggctcttgatctcgacaagctcgatcttctgtccgtcgcgcgtttcctcgcgcatcaggacggcgacgtcgatgccgcgactgtcattgccctcgaccagatatttctgccggtagccgttgccgaccatgcggaagagatagccgtattcgaaggcctgcagcgcctccatgttgtcgatctcctgcaggcagaggatatcggcatccgcgtcggcgatcgccagcgccgtcatctgcctggtgtcgtcggtggacgcgatcacccgcgcctgctccagctgctggtagacgccctcgcttctgacgtcgaagagcttgatcacccggtcctggcgcagctggtttcgaaatcctgtgaagtcgaaccgcgtcatgaggttttcgacgttgaaggtggcaatgcgtaaagacatcaggcacttccggttggctttgcaccaacactagagagcaaatgccgcttcgaaaagcccgcttcaccgatcatagccgccatgcaccccggatcatcgcccggacgtcatcgccgacggcaagcttcgaccggctgaaggccctgaggatctgcccatccgccagcctgagccgggccgcataacgctcgccttcgtagagcacggattcgaccgtccccgcgatcccttccccgccgagaacgacatcctcctgccgcaccagaacatccgatcgcgacgccgaaccgccaccacccacaaacaacggctcgaccgccgcccaatcgagttgcctgacgtcaccatcaggagacctcagcgaaacgatcgccccccgaccgatcaacccgccgacgacgcgcccctccggccgcgcatagatctcatccggcggcgccacctgcagcagctgcccttccgacatcaccgcgacgtcggtcgccagcgccatcgcctcgctctggtcatgcgtgacatagaccatcgtcgcgcccgaacgctggtggaactcgcgaaatgtctcctccatctcctgcttcaggtgacggtcgagattggcgagcggttcgtcgagcagcaccacgtcgggcgatgtgacgaggcagcgcgccaaagccacgcgctgccgctgtccgcccgagagatcggcgggccgccgctccgcataggcctcgagcctgacggtcgcgagcgcctcgcccacctttctgcgataggcctcgccagagatgccgcgcaccttcagcggatagccgacattgtcggcgacgctcatatgcggccacagcgcgtaggactggaacaccatcgccatgttgcgcctttccggcggcagcgattgcgaggcgtcggcgagcagccgttcgccgagatgcagcgagccgtccgtcggcgtctcgaagccggcgatcatgcgcagcaccgtcgtcttcccacagccggatggcccgagcagcgccaggaagccgccttcgcgcacgtcgatcgaaaggttcgagacggcggcgcgtccggtgccgaaatccttggcgacacgattgaggatcagtttcgccacggcaccactcccttcggcagccgctttgccatcagttccagaagcagcatcatgaaaacgaccatgagaacgacgagcaccgacagcgccgaggcgagatcggaactgccgctgtcatcgagattgtagatggcgacgccaagcgtctgcgtccccgccgaccagagcagcgccgagatggtcagctcgttgcaggcgatcaggaagacgaggatgaccgaggcgccggccgccggcgcgatcagcggcacgatgatatccttcagccgccggaagaaccccgcccccgacagccgcgccgcctcttccagcgccggatcgagctggtggaaggcgctgacgacaggcttgaggctgacggcgaagaagctcgagagataggcgatcaggatgatccacacggtcccgtaaatcgtcacgttgatcagcggaatgggtgccgcgaagacgaggatgaacgacaccgcgacgacgatccccggcagcgaatacgggatctcgatgacgctggcgacgatacgccccagcaggtccctgcgccgcgtcagcgcataggcggcaagcacggtcaccataaggagacacaaggcggtgcccgccgccagcgacagcgaattgacgaaggccgtccgcgtcaccgcctgcgtgaagaggatctcggagaaggcctggaacgtcatcgtcttgaaggtcaagggcacgccataggccggcaccagggcaccggcgagcagcgcgaagaagggtgccgccagcatgaagaagatcagtatccagagcaccggcgcgaacaggagcttccaatatccgagctcgaacgtggccgtcgcgcccgagagaccgagcacgcggtaatcgcgcccgcgcagcgcccggtcctggatggcgagcccggccaccgagatgatcgcgatgatcgccgacagcagcgcgacgtcgccgaaggtgcggctggtgaaggccgagaacttggtgaagatcagcgtcggcagcgtgtagatcgaggccggaatgccgagaatggcgggaatgccgaaattgccggtgctggagacgaaggagatcgccgcgcccgcgatgatcccaggtagcgacagcggcaggatgatgtcgcgaaacacccggaagctggaagcgcccgagaggcgcgccgcctcgaccccgtcgcgcggcagcgacatcaggctggcgcgcagcgccagatagaccagcggcgcatgctgcacgccataaagcagcgcgatgccgccgaccgagtagagcggctgcggcgagcccaaaggcggcgcgatatgcagcgccttcagaagcgggctcgacggccccgacatctgcacccaggcaagtgccgtcacctgcggcgggatcatcatcggcagcacgaagaggaagctgatcaaccccttcgccctgatatcggtgagcgtcagcagaaaggcgaaggcgcagccgatcgcaagcgagatgatcgtgccgaggacggcggtgaccagcgtgtaataggtcgccgaccagagcgccggatcggagagaaccgcgatcgcgccgccattggcgaaggccgcgacacccgtcatcgccagccgcgcaagcggcagcacgctgaggatgagaacgatcaggacgataaaaggaaacagccaggcgggctggctgtttccgggacgcacatatccgtacatggacgctgtcggctatcagttcgagccgtagatgcccgagaaggtcttcaggtcggcatcggtgttcttgagcgcggaggcggcgttgatcggcaggaccttgatcgtgtcgcgtgccgggaagccttccggaagcttcatgccgttacgagcagggatgtagccgagcttgacgaagccttcctggcccttttcggagagcacgtaatcgacgaacttcttggcggcgtctgcattcttggcgctggcgaggataccgaccggctcggtcacggccgaaacgccttccgtcgggaagacgaactcgaccggcgcgcccttggccttttcgcggatcggcatgtagtcgacgatcatgccataggccttctcgcccgaggcgacggccttgaggatgccgccgttaccgccggcagcggttgcgccgtttgcggccaggcccttgtagaaatcccagccgaggccatcgacgccggcaagcgtctgcgcgtggatgagggcagcacccgaggtcagcgggctcggcatggtgacgaggcccttggcttccggcttcgtcaggtccttccagctcgtcggcttcagcgatgcggacgtgttgtagatgataccggtggtgatcagcttggtcgaatagtagtagccgtcggcgtcataaagcgaggcgtcgtagttggcggcctcgggcgacttgtaggccatcagcttgccggcttccttgaggcgctcgagcgtcacggtgtcggcgatcaggagaacgtcggcgacgggattgccggcctcgatctcggcctgcagcttggccatgatcttcggcgtgccgtcgcgcacccaatcgaccttgatgtcggggttggcggccatgaagccatcgacggtcgcctgcgcatcctcgttcggctggctggtgtagagcaccaggttggcggcggatgcgggaacggcaaacaggcttgcggcgagaagcgccgcggcggaaacgatggtcttcattggataatgccctcggtgatggaaggcccgttcattagacatctggattaacacgattgtgacagttgacgtgcgccgatcatcaatgcgtcgcccttgacccgatcacctcacccctatcttctagcccgcgttttcattttcgatttcgggacaggaggaagtcttatggaatatcgtcaattgggccgttcgggcctcagggtttccagactcaccatgggcaccatgaccttcggcggcaagggctgggcaaagaccgtgggcgacctcggcgtctcggaagcccgccgcctcgtcgacatgtgcatcgacgccggcgtcaatctgatcgacacggccgacgtctattcggcgggcgcctcggaagagatcatcggcgagatcctcggcggcgtcaggaagaacggcacgctgatcgccaccaaggcccgctttccgatgggcgaaggccccaacgacgccggcaattcgcgctaccacctcatcagcgcctgcgaagccagcctcaggcgcatgaagaccgatgtcatcgatctctaccaggtgcacgaatgggacggccagacgccgctcgaggaaaccctggaagcgctcgacacgctcatcaagcagggcaaggtccgctacgtcggatgctccaacttctccggctggcacatcatgaaggcgctgggcatcagcgagcgcgagcaccgcgagcgcttcgtcagccagcagatccactacacgctggaagcccgcgacgccgagttcgagctgctgccgatcagcctcgaccaggggctcggcgtgctggtctggagcccgctcgccggcggtcttttgtcgggcaagcaccgccgcaaccaggccgcccccgaaggcacccgccagttcgccggctggaccgagccgccgatccgcgacgaggaccgcctgtggaatatcgtggaaacgctggtgtcggtcgccgaaagccgcaacgtctcggcggcccaggtggcgctcgcctggctgctcggtcgccaggcggtgacgtcggtcatcatcggtggacgcacggaagcgcagttcaaggacaatctggcggcggccgacctgaaactgtcggcggaagagcgcaagcggctcgacgatgtcagcctgccgcagctgctctatccctactggcaccagcgcaacaccgccagcgacaggcttggcgaggccgatctatccctgctcggcccgcacctcaatcaatagaacggaaacggtcggcggctctacgcgccgccgatctcgcccgcgatcagctttccaagccgcgcgatgccttcctcgatcttctcctcgttgctcgacgagaagctcatgcgcaaggtgttctcgcccgagccatcggcgaagaaggcgcggcccggcacgaaggcgaccttgacggtctcgatcgatttcgccagcagcttcgccccgtccataccctttggcagcgtcacccagacgaacatcccgccctcgggcttcgtccagctgacaccctcgggcatatgcttttcgagcgccgaaagcatcacgtcgcgacgcttgctgtaggcggccttgatcttggcgacctgggcgtcgaagcccttgcgcgcgacctcggcgatggcgatctggttgatcgtcgaggaatgcagatcggccgcctgcttcatcagcaccagcttgcgaatgacaggggcgttggcgacgatgaagccgacacgcaggccgggcgccagcgtcttcgagaacgagccgcaatagatcgtccttgtcttgtcgatatcgcccttctcggcgatctcgagcgacaggatcggcgcgatcgcctcgccgtcatagcgcagcgactgatatgccgcgtcctcgatgatggcgatgtccatctcgtcggcgagcttgatcagcttttcgcgcgcctcgaggtcgacgctctcgccggtcgggttcgagaagtcggcggagagataggcgaacttcaccttgccaccggcctccctggcctgcgcctggtaggaggcgggcgtgcggttaccgttgggcgtcagctggtcgtaggccggctcataggcgttgaacgcctgcagcgcgccgagataggtcggccacgtcaccagcgccgtgtcgttgggcgacaggaacagcttgccgagataatccagcccctgctgcgagccggagacgatgaagacgttgtcgaggccgcaggcaatgccgagcttgcccatctcgcccaccagccattcgcgcaacggcttgtagccttcgctcaccgaatactgcagggccgagttgaccgccgtgctgtcgaaaatatccgaataggcctgcttgaactccctgtcgggaaacagcgccggatcgggaattccgcccgcgaaggaaatgatatcgggctgatcgagaagcttcaggagttcgcggatctccgaggcgcgcatgcgcgacgagcgggttgcaaagatgttgtcccagttcagcatcggggagcttcctcgtaattttttgtctttactggacaagaccacgcaataaatgataagtcaacattactgacctatttgtttgctaccgtgacaattttcaggtcttttaatgcgaaagccggtgaaatcggcctttgcaaagcataggttgcggcagtagtgtcgcgaccgaaatccaacaggcttatgaaggtgcccggacaatgaccgcgtcgtcgaacactcccgaaatcaagattgaattccatacctcgccggtctccgacgccgaccgcaccaaggcactggaaacgccgggcttcggcaaggtcttcaccgatcacatggtgctggcaaaatggacaacggacaagggctggcacgatgccaaggtcacgccgcgccgcccgctggaactcgatccggcaagcgccgtcctgcactacgcccaggaaatcttcgagggcatgaaggcctacaaggccgatgacggccgcatcctgctcttccgcccggaacagaacgccagccgcttcaaccagtcggccgagcgcatggccatgccgccggttcccgaggaactcttcctaaaggcggtcgaggagctcgtccgtatcgaccggaactggataccgtcgggtgacggcagcctctatctgcgtcccttcatgttcgccaacgaggccttcctcggcgttcgtccggcgcaggaatatatcttctgcgtcatcgcctcgcccgtcggcgcctatttcaagggcggcgccaaggccgtatcgctctgggtcgagaccgaatacacgcgcgctgccgccggcggcacgggagccgccaaatgcggcggcaactatgccgcgagcctcgtcgcgcaggctcaggccgccaagaaggaatgcgatcaggtcgtgttcctcgatgcggccgaacaccgttgggtcgaagagctcggcggcatgaacgtcttcttcgtgatgaacgacggcaccgtcgtcaccccgccgctcggcggcacgatcctgccgggcatcacccgtgcctcggtcatcgttctcgcggaagaaaagggcctcaaggtcgagcagcgcccctactccttcgccgagtggcaggctgacgctgccagcggcaagctggtcgaagccttcgcctgcggcaccgccgccgtgctcgccggcatcggcctcgtccgccacgccggcggcgagttcaaggtcggcaacggtgagacaggcaggctgacgacggagctgcgcaacgaactggtcggcctgcagaagggcgtcaccaacgaccagcgcggctggacccgccgtatcatggcgtaagccaccggatagatccgatcaccacgaaaggccggcaaggtttgcaccttggccggccttttcattgcaggtcgtcaggaccgcagaagtgctgcgatctgcgcctgactcgggatctgcccctgcggcgtcagcttgtcgacgacaccggggagaaccttggaaagctggttgagcagttcctgctcgctgatccccgcctggcgcgccagatcgctgatcgtctgcgagccgagcgcgctttccagattgccgggcgcgatcggctggttctggccgggcttcacccaggaatcggccaccgacccctgcccggcttccgcgagcttgccgagcaatccgcccaatccgccgagcccgccaagcccgccggcaaggccaccgagattgccgagcagcccgccatcgtcggcgccggcattcgcttgctggttcggctgctgtggctgctccggctcgcttttgccaccggcgccaagcaacttgccgacgagaagcgcgccgagcgcgatcatgatcggcttcgagatgttcccaccgggaacggcatcatcaaacaatcccatgtcattctccttcggtgttgttttgaaacgaacagcaaaaacacaacatgaggcccggccgagccttgaattccgccatgacaactttagctgatgctgaaagatggtcggattgtccgcccattcaaggaggggaaaacaagatgtctgtcatcgggtggattattctcggactgatcgccggcttcatcggcagcaagatcgtcaacaagaccggctctggcatgctgatggacatcgttctggggatcgtcggcgccatcgtcggcggcgtgatcttcagcttcttcggcgcctccggcgtcaccggcttcaacatctacagcctcgtcgtcgccgtcatcggcgcggtcgtggtgctgtggctgtatcatgcggtgaatggtcggcgttcggtgtgacaatcaaagctaactgtgcccaaccacacgcggtgattgacactggcgtgttactcgctcgactatgcttgcaatagtcaggagcagacatcatgccgaacgacgccacgacgtccttctacgcagaaaacgcggcggtttacgccacacgcgaccgcgaacttccgacggcgaggctggatgcatttctcgccgccctacccgttggcgcggcaatccttgaacttggctgtggcggcggtcaggacagcgcctacatgctgtcacgcggcttcgacgtcacgccgaccgacggatcaccggaactggcgagccaggccgaagcccttctgggtcggcgcgtcgagatcatccgcttcgagcagttggacaaggatgcgtgctatggcggcgtctgggccgaagcgagcctgctgcacgtcgaacgagacctcctgccagatgtgttcgcgcgtatccgccgcgcgctgaagcccggcggcctgtttcacgccaccttcaaggctggcgaagacgagggacacgacggcttcggtcgctactacaactacctctcggccaacacgctgtccgacctcctcgtgcgttcaggctggaacgacatcactatcagcgagcacgacggcagcggctacgacgacaagcccacgcgctggcttgcggcgacggcaaaacgataaaggccggcgctttcgcaccggcctctcattttcagcagacgcggctggccaagatgtcggccagcctgtcaccatcacttagttgacggccttgtcgacgagcttgttcttgccgatccaaggcatcatgccgcgcagcttggcgccgacttcttcgatcggatgctcgtcgttgacgcggcggatacccttgaagcgggcagcgccggcacggtattcctgcatccagtccgaggtgaacttgccggtctggatgtccttgaggacacgcttcatctcggccttggtctcttcggtgatgatgcgcgggccggtgacgtattcgccccactcagcggtgttcgagatcgagtagttcatgttggcgataccgccttcatagatcaggtcgacgatgagcttcacttcgtgcaggcattcgaaataggccatttcaggcgcgtagccagcttccgtcagcgtttcgaagccggcgcggatcagttcgacgagaccgccgcacagaacgacctgttcgccgaagaggtcggtttcgcactcttcgcggaagttggtttcgatgatgcccgaacggccgccgccgacgccgcaggcgtaggagagagcaagttcaagagcgttgcccgaagcgttctggtgaacggcaacgaggcagggaacgccgccgcccttctggtattcgccgcgaaccgtgtggccagggcccttcggtgcgatcatgacgacgtcgagcgaagccttcggctcgatcaggccgaagtgaacgttgaggccgtgcgcgaatgcgattgccgcgccgtcgcggatgttgccggcgatgtcggccttgtagatgtcggcctgcagttcgtcaggcgtcgccatcatcagcaggtcgccccacttggcggcgtcagcgacggtcatgaccttgaagccgtcggcttcggccttcttgatggtcggcgaaccggccttcagcgcgatggcgacgttggcagcaccgctgtccttcaggttcagcgcgtgggcgcgaccctgcgagccgtagccgacgatgacgacgttcttggacttgatgaggttgaggtctgcatcacgatcgtaatagacgcgcatttgattgtccttccctttgcttgtcttgtagactgtcagtattcggtaaatctgtcgtcagacgacggccggcatgtcggccagcgccttctccgtcccgtagagccggaggaaggcggtcaccgccttttccgcctggcgcgcggtatccgtaacgcccgtggtatcgcccagcagcatgcgcacatgcagatcggaaacgatcaggccgtagagcgtgtgataggcttcgtcggcatcgtggaaacgcagcagccctgcccgcttgccggaatcgatcagcgccatggcacggcggtcgatctgtcggcggccgcgctcgagcaaaagcttgccgagcttcgagccgtcgcgcggcgactggccgatcgccagacggttcaaagccagcgacacgtcgcccgccagaacctcgagcagatcgcgcgagaaaatcacgagatggtcgtgcaggctggccgaggtcagccgctcgccgttgcgctcgaaggtgcgcaccttgctggcctgataggcgatcatcgccgacagcaggccgtcgcggtcgccaaaccatttatacaggctttccttggagcaattggccgcgcgcgcgacgcccgacgtggtcagcgccttttcgccgccgtccacgagcaaccgcagcgcctgctccagaaccgcgttctggcgcggcgagaattcgctgggctccaagttttcgacagacacggcattcgctcccgataagtaccgtacggtacggttcgtgagcgtttattgcgcagaaggcccgtcccgtcaagaggtcgcaacggtcgccagaataatttttcagcgcggtgccggtttattcggcagcgttgagcactgcatcgacatcgcgcgacggcgacatgccgtatagacggctatattcgcggctgaactgtgacgggctctggtatccgacgcggtggccggcggtgccggcatccagccgctcgatcagcatcagccgacgcgcttcgtgcagtcggatctgcttctgatactgcaccggcgtcatcgccgtgatcgacttgaagtgatgatggaaggacgagacgctcatgttgacttgctcggccagttcctcgatgcgcagcgtcctggcgaaattctcgcgcagccaggcgatcgcccgggcgatccggttgccctggctgtcggccatcgcgatatcgatcagctggtcgcccgccggcccggtgaggatgcgatagaggatttcctgctcgatcagcggcgccatcgcggcgatatccgctggactatcaagcaagcgcaggagcctgaccgccgcatcgagaagctccggcgtcgccacgttgacgacgatgccgcgctggccggatggcggtgctgcgctacgctgtatcgtcgagcggctgagcagatgcagcagcttctcgctgttgatcgcaagcgtgatacagagatgcggaacctcgcgacttgcctcgaccacccgccacgcgacgggcagatcgacggacgtcaggagatagtcgcccgccccgtagttgatcgtatcgctaccgagctgcacgcttttcgcgccctggataaccatggcgaaacaaggccggtaactgccgtgacagggcgcgctcggcgtcgtgcggcggctgatcccgagcccctcgatccccgtctgcacctccccctcgtcgagcgcgaagcgtcccgcgatcgacgcgatctcctggtagcggttgaacagcattgtcatcaggcgcactttccggtgagaacggcttgcctgccgtttggactgcttatctaggatggatttgcgtgaccgcaaataccgtcctccctcacttttgcaggctccgcccacttttgcaggatcgtgcaagaacgcgagaggatcgctctaacgctgcgtgccggctttggcgcataagagcaccatccctttccaccccgccaaagaaggatacttcccatgccaatcgcaagaggctacgccgctaccgatgcatccaagccgctgacgccgttcaccttcgagcgtcgggaaccgaacgccgacgacgtcgtcatcgacatcaagttcgccggcatctgccattccgacattcacaccgttcgcaacgaatggaagaatgccgtctacccgatcgtaccgggccacgaaatcgccggcatcgtttcggccgtcggcgccaatgtcaccaagttcaaggtcggcgaccgcgtcggcgttggctgcttcgtcgacagctgcgtcggctgcgccacccgcgacgtcgataacgagcattacatgccgggcctcgtccagacctacaacagcgtcgaagccgacggcaagacggcgacccagggcggctattccgactcgatcgtggtcaaggaaggctatgtcctgtcgatccccgacaacctgccgctcgacgcatccgcaccgctgctctgcgccggcatcaccctctattcgccgctcgcgcactggaaggccggtcccggcaagaaggtcgcgatcgtcggcatgggcggcctcggccatatgggtgtgaagatcggtgcggccatgggtgccgatatcaccgttctcagccagacgctctcgaagaaggaagacggcctgaagctcggcgccaaggaatactacgcgacctcggacgcatcgaccttcgaaaagctcgccggcaccttcgacctgatcatctgcaccgcgggcgtcgccatcgactggaacgcctatctcaacctgctgaaggtcgacggctcgatggtcatcgtcggcgcgccggagcacgccatcccggttcacgccttctcgctgatcccgggccgcaagagcctgtccggctcgatgatcggctcgatcaaggaaacccaggaaatgctggatttctgcggcaagcacaacatcgtctcggaaatcgagaagatcaacatccagcaagtcaacgaagcctacgagcgcgtcctgaagagcgacgttcgctaccgcttcgtcatcgacatcgcctcgctggcggcctgatcgaaccgacgacgccgctccatcggtcgaaaaccgaagcccccgccgttcatctggcgggggctttttcgttgccggcaacatgaggcgcaacgaaagcctgacgagaccttatttttcgtcggcgatggtctcgcgctgcgttatcagacgggcgctgtgctggccgctgaggtagatccacaaccagctccaggcaacagcgaagcgcgaccgcgtgccgataagaaagtagatgtgggcaatcccccagatccaccacgcaaggccacccttgagcttgatcctgccgaaatcggcgatggccgcactccggccgatcgtcgccaggcttccctggtgcctgtacttgaagacgggcggcgggctgcccttcattcgggcgtgaatgaccttggcgacgaaagctccctgctgcttggcggcgggcgccacgcccggcaccggcgcgccgctctcctgcatcaccgaggcggtgtcgccgatgacgaacacatcgggcaggcccggcgccgtcagatccttctcgacgaccgcgcggcccgcgcggtcggccgcgatgcccagccatttcgccgcgggcgacgcctgaacgccggcggcccagttgatcgtccggctcccgatgaactcctcgccgatctgaacgccttcggccgtgcattcggtgaccggctttccaagccgcacctcgacgccgagatcgttgagcgccttcaacgcatagtcggacaactcgggcacgaaggtcggcaggacgcgcggcccggcctccacaaggatgaccttggccttgcgggtgtcgatattgcggaactccttcggcaacgtcttgtgcgccagttcggcgatgatgcccgcaagctccacgccggtcgggccggcgccgatgacgatgaaggtcagcaaagcatcgcgctcggccggatcgcttgccgtctcggccctttcgaacgccagaagcacccggcggcggatggtcgtcgcatcctcgagcgtcttcagcccctgggccaccggctcccagtcgtcgcgaccgaaatatgcatgggtcgcgcccgtggccagtaccagcgtgtcgtagcgcaacacgtttccatcgcgcagcaacaccgacttcgcaccggtatcgacgcccgagacatcgccgagcagcgtcgttacttcggggcggtcgctgtagagatgccggatcggccacgcgatctcggatgtcgacagaatcgttgtggcgacctgatagagcagcggctggaagagatgatggttacgccgatcgacgagcgtgatgcggacaccggcacctttcaggtcgtttacgagttgcagccccccaaagccccctccaacaacgacgacgtgatgatcagccataagctacccttttggtgatttgcataagaattgatcaatgtcatcttccgcatccccgtttcaatcaccgtttcggcatagctaacctgcgctgatgaggttgcaaccaatgaccgcgtggacggagaagacgggcatgcgcagcccgccgccattctaaaccgccctcgtcgccgatgcaaaagagctggatcggctggctatttcacctgttatttgcatgatgtccccaggggtcaaaactcgaagaaagcgcgtcgcagggacgccgcgaccagggagcatcgaatgcggacaatcggcctgatcggcggcatgagctttgaaagctccgccgtctactaccgcctgatcaacgaaatggtgcgcgaccgcctcggcggcttcgcctccgccgaactgctgatgcactccgtgaatttcgacgagatcgtcgcgatgcagaaggccggcgactgggaggcggccggcaagcggctcggcgatgtcgccgcgcgcctgcaatcggccggcgccgactgtgtcctgatctgcaccaataccatgcatctggtcgcaggacccgtcgcggaacgcatcaccgtgccgctgatccacatcatcgacgagaccgcggacgcgctgaagcaagcgggatgccgccgcccgctcctgctcgccacgcgctacacgatggagcacggcttctacaccgatcgcgcaagaagcctcgggctcgacatcatggtgcccgatcaggaggaccgcacgacggttcacgacatcatcttcaacgagctctgcgccgggcaaatcctcgatcgctcgcgcgacaagctgttcgagatcatcgagcgcgaacgcgccaggggcgccgacagcatcatcctcggctgcaccgagatctgcctgatcctcgatcccgaccatctgcccctgcccggcttcgacaccacgaagatccacgcaaacgccgccgtcgacttcgcccttggcaatcgaacgccacggaagtcggtcgcctagctcccacaatttagttgactaagtcaatcaattgacggacatggtctctcaacaggagaccatgtccatgtccgattccgccctcatcgacgcagcgcgcgacttcaaccgcttctacaccaactttctcggcgtcctgaacaaggcctatctcgacacgcccttcacgctgaccgatgcccgcgtgctcttcgagatcggctcgcgggaacaggtcagcgccgtggcgctcgcccgcgatcttcagcttgatccggcctatctcagccgcatcctgaagcgcttcaaggccgagggcctgatcgagacgacgcccgaccccgacgaccggcgcagccagctcatctccgtcaccgaccagggacaccagcaatttcaggagcttggcaaacgctccaatgaccagatcaccgagcgtttcaacaagctggcagctggcgaaccgcggagcatcgtcgccgccatgaagacgatccgatcgctgctcgatccggacgcgacgctgccgccgctggtcatccgccctcaccgcgccggcgacatgggctggatcgtggagagccaggcaaagttctacgccgaggagtatggctgggacatgcgcttcgaaggcctcgtcgccgaagtcgcggggcgcttcctccgcgatttcgatccggcgatggactattgctggatcgccgagcgcggcggcatcaacatcggctccatcctgatcaccaacggcggcgacggcgtcgccaagctgcggcttctctatatcgacaggtcggcgcgcgggcttggcctcggaaagacgttggtcgacgagtgcatccgcttcgccaaagccaagggataccggcagatctcgctttggaccaacgacatcctgcatgccgcgcgcgccatctatctcaaggccggcttccgcctcgtcgccgaggaaaggcaccgcatgttcggcccggagctgaacggccagacctgggtactcgatctctgatctgcagcatcgcaaaagtttcgcttgatttggaaacgatcatttcctaattaggcatcatgacgacgacaacgctcgacccaaagcccccgacacgcggccgcccacgcgcattcgacctcgatgccgcgctcgacagggcgctcgaggtctttgccgagcgcggttaccaggcggcctcgatcagcgatctgaccgaggccatgggcctgacgtcgggcagcgtctacaaggccttcaaggacaagcgcggcgtctttctcgcatccttcgagcgctatcgcaccgttcgccgcgtcttgctggacgcgcggctcaagaacgccggcaacggccgcgacaagatcagggagctgctggcgttctacgccgacgcttcgcatgggctgtccggcaagcgcggctgtctggtggtcagcagcgccaacgatctcgccctcttcgatgaggaggccgccaaccagatcaagaccgcggccgcgatcaatgaggcacgcatcctcgacctcctgcgcctcggccaggccgacggttcgatctcgccatcggtggatcccgaaagctgcgcccgcacgctgttctgcctcacgcagggcatgcggatcgccggcaagaccggccgaggccaggaggaaatggcagccgtcgtcgacagcgcgatgcagctcgtcacctgagagcattgagcagaaggggcattcgccccgcgtaaataccagaccataatccgaaaagcccccatcggagcctcgcatgagcatttccgccaccactcccgagaccgtcgcccagccggcgatctcgcccttgatgacattcctcttcgccgccgcctgcgggctcgtggccgccaatctctattacggccagccgctcgccgggccgatcagcgcctcgctcggcttcagccccgccgccaccggcctgatcgtcactttgacccagatcggctatggtctcggcctgctgctcctggtgccgctcggcgacctcgtggaaaaccgcaagctggtgctgaccctggtgctcatgtcggctttggccctcgttggcgccgcgctgtccaccacgccgacactgttcctcaccgcctcgctctctatcggcctgggctcggtcgccgttcaggttctcgtgcccttcgccgccaacatggcgccggatgcctcgcgcggccgcgtcgtcggcaatgtcatgagcgggctgctctgcggcatcatgctcgcccgtcccgccgcgagcttcctggccgaggccacctcctggcacgtcgtctattacgcgtcggccgtcgtcatgatcgtgcttgccgcgatcctgcgtgtccagctgccggtccgcacgccgcacacccggctgagctatggcgcgctcctggcctcgatggcgcatctcgccttgcgctcgcgcgtcctgcagcgccgcgcgctctatcaggccggcatgttcggcgccttcagcctgttctggacgacgacgccgctgttgctcgcaagccccgccttcggcctgacgcagaacggcatcgcgctgttcgctctcgccggagccgcgggcgccatcgcctcgccgatcgccggccgcctcgccgaccgcgacctcggcaagatcgcctcgaccatcgccatgctctgcggcatcaccgccttcctgatcagccacttcgcgaccgacggctcggcgctggcgctggcgctgctgacggcggccgccatcattctcgatttcggggtgacgaccaatctcgtggtcggccagagggcgatctacgcgatcagcccggagcaccgcagccgcctcaacggcctgttcatggcgactttcttcgccggcggcgcgctcggctcggccgtcggcggctgggcgttcgcgaccggcggctggacgctggccgcctggatcggcctctgcttccccagcctcgccttcctgctcttcctcaccgaaggacggcgcaagcgctgactggcatcagtgaaggcgtgacgcgtcacccagcgccgcaaggcacggaagcgtcacgcgcccgatgcgtcgaacttgacccgggcggagcgaacggcctcgtggttgttctccgcccagttcaaaagcagcgccagcgtctggtagagcgagtttccgagatccgtcatccggtattcgacgctcggcggcttggtcgggaacacctcgcgctcgatatagccatcacgctgcaggtcgcgcagcgtctgcgtcagcatgcgctgtgaaatgtccggaatcatccggcgcagctccccgaagcggtaaggccgctgcgacagcgcctccagcatcagcgtcgaccacttgccgccgatctgctgcatcatgtcccgcaccgggcaattgttgaagtcgagcttggaaagatcgaccgcgtgacgcacgcgcggctcggccttgctcttcagattgacgacggtgccggccatgtcgctggttcccttttggtaacttacggcgcaaaaactgccttctttacagctgtcggtcaatccctattctagccctggtctcttttcgagaccagcaatcgaacctagaggtttacagacatgagcgaaacgatcctcatcaccggtgccgccgggcagctcggccagcgcgtcatccatcacctgctcgaaacctacaaggttcccgcggccaatctgatcgccgccagccgcgacatctccaagctggctgacctcgccgccaggggcgtgcagacccgtaaggccgatttcgacgacgccgcctcgctggaagcagccttcaagggcgccgaccgcgtgctgatcatcagcaccgacgcgctcgccgttcccggtcagcgcctgaagcagcacacgaccgccgtcgccgccgccgtcaaggccggcgtcaagcacatcgcctacacctcgatgccttcgcccgacaagtcgctcgtcaccttcgcgccggatcacctcggcaccgaaaacgccgtcaaggcgagcggcctgccctacaccatcatccgcaacgcctggtatctcgacaattacatgcattccatgccacacaacctccagggcggcagctggtatacggcatcgggcgacggcaaggttccgaacatctcgcgtgacgactgcgcccttgcggccgcagcggccctggcctccggcaccaaggacagcgtcacctacacgctgacaggcgcccagtcgctctccgccgatgaaatcgccgccgccatttcgcaagccgccggcaagccgctcgccgccgtgaaggtgagcgacgaccagctgcgccagggcctgctcggcgccggtctgcccgattttgtcgctgacatgctggtctcggccgacgccaatgtccgcgccggcaatttcgatcatgtgaccgaggacttcaccagactgaccggcaggacgccgcaatcgctgaaggattacttcgtggccaacaaggcagcgctcgtcgcctgacagcgctctgcctgaagccacaacccgctccgcgccaccggagcgggtttttgtttggccaaactggaattagatcttctggccgcaagcgcggcagaagcggcgcacggtctcggccatgccgaactccagcgcatccgccgtcagcccgtggccgatcgagacttccgcgagcttcgggatgcgcttgaccagcgccggcaggttggcgacggtcagatcgtgccctgcattgacgccgagcccgatcgccagcgccgcatccgccgtcttgccgagcgcttcgaggatcggccccacccgctccggcgcgtcgtagcagccgccgtaggggccggtgtagagttcgatccgatcggctccgaccgccttggcgatcgccaccgcctcctcgtccccgtcgccatcggcaaacagcgatacgcgggtgcccatcttcttcagccgcgcgatcacatccgtcagcaatgcccggtccttgcggaagtcccagccgtgatcggacgtcgcctgcgagggatgatccggcaccagcgtcacctgctcgggcgcggccttggcgcagagctccaggaactcgtcggtcggataaccctcgatgttgaactccgcatcaggaaactcgtcgtcgatcaagttgcggataacaggcaggtcggaaaagcggatgtggcgctcgtcgggccgcggatgaaccgtcagcccgctcgcgcccgatttgagcgcgatgcgacccagcgcctcgacgcttggccagggcagatcgcggcgattgcgcagcatggcgatggcgttgagattgacggaaagcgtggtcggcatggcgagtttccattcaatgaaagaggctgccccgcttttaagccaaggacgccgtcacggccaacgagattcgtgcatgatcgcatgcgaatttctgatcgatggctcaaagtcgccgcctcgctaccgacaaggccgcgaagacgtcaaagcgcccggcagaaacgattaagcacgacgaatgaaaagccacgccgcaacatcattcacaagtcgcgcttcaatcgcgcgtacattcgactattatttacaagtgactatttttaagactaacaaatcagtcatttaacgcatagtctgattgcaatggatcaccagatcgacgatccgttgctttgcattccgaccgggaaggcatcgtcaaaaccgttcgaccgcgcccgtatccgtgtcatgcgcgcaactgatcatgcgtagaacaggagggctcatgtccgaacgacataagcaggctgcatcaccgaacgctccgccccgggcgcctcccgaatacaggtttctgccacgcatagcgcgcccgctgagcctgcccggcggcaaggtcgcgattgccgatatggccaatgccttcggcgtcacccaccggaccctgcatttctatgaggagaaggggctgatcgcttcgggccggatcgggctcatgcgcgtctacgagcatgccgacatcaggcgcatggccgtcatcaacgtctgccgtgaagcgggcatgccggtggccgtcattcaggatctgatggccgatctctgccgctccacctcccagcaggaagccgacgcggtcttcgccgccgccctgacatctcgaaaacgcgagctgacggcggacatgtcgacgctgcatcgccagcttcagcaggtcaacgaactgctcgagaacaccgcccccggcgacgagccgccgctcaacgacaaccagcacgaacgcgcgctcaccgaacaggagtatcgttgcctcgtgctgatgaccgaggggctgtcgacgcaacgcatcgcccgcacgatcgacatcgccgaggacgaagcgaaatcgatcgaagccgcgatcattcagaaactcgacgccaacaaccgcttccaggccatcgccaaggcagtcctcctcggcatcgttcatatttgaggcatgtcgcgcaaaaaactattcagcggttttgcgccaaccacatgcgacgaaacaaacgcgcgacgcgctttggaaggtctcagcgaacgatcgtcagcgtttccgccgcgcgcgtgatcgcggtgtagagccagcgctcccttgtatcgcgaaacgcccagctttcgtcgaacagcacgacattgttccactgcgaaccctgcgccttgtgcacggtcagcgcatagccgaaatcgaactcgtcgtagcgcttgcgggtattccagggaatctcttcctcgacattttcgaacacctgcttcaggagcttgatcttcgccgccccgcgatcgatgtcgtcatcctcgggccggatcagtagattgatccccggcttggccgtctccttcgacgacgtcatcacctgccagagcgagccgttgagcagccccttggccggatcgttgcgcaggcagaccagcttgtcgcccgtctgcggataatcggccgtgaaacccttcagctcgcgcagccgctgattatagcgccgccgcgtgcggttcgtcccgacgagcacctgatcggcgtcgagcaccagcgactggttgacctcgttcttcgagatcacccgcgccgacccgtaatcgccatacatgatctccttgccctcgcgcacctgcatggcgagcccgatgatcgggttgtcgcgcgcctgcctgtggatatcggtcaagagatagtcgggttcctgattggtgaaaaagccgccgccggagaccggtggcaactgtccgggatcaccaagcaccaggatcggcgtgccgaagctcatcaggtccttgcccagcgcctcgtccaccatcgagcattcgtcgacgatgatcagcgccgccttggcgacggggctctggcggttgatggtgaacatcggcgcgatcgaggtcttgccggtctcctcgtcctcgacggcttcctcgccgcgcggccggtagatgagcgaatgcagcgtgcgcgcattgctggcgccgcgcgtgcgcagcacctgcgccgccttgccggtaaatgccgcaaacagcacctcgccatccacatgctcggcgaaatgccgcgcaagcgtcgtcttgcccgtaccggcgtagccgaacaggcggaaaatcggggccttgccctccttcagccatttggcaacggctttcagggcttcgtcttgttgcggagcaaattgcatgatccatcgacttggcaggattcgcgccggataggcaaccgaaaatggtgagcgtcggccggcctttcgcgcccgatcgaaaaaacgacgacgtcagggaataaaatcgccccccgctttgtctcatgtcaggcaacgcaaaccgcgtccgcccaaccgaggagacacccgatgaaatccgcgaaattcctgatcgctctcaccctcgcatccgcggccgccaccgccgccttcgccgctccgcccgtcaagacggtcgaatccgccaagggcaacgtccttgccggcgaaaacggtatgtcgctctacaccttcaagaaggacacgaagggcgtttccaattgctacgacgattgcgccaagaactggcctcctctgatggccgatagcaatgccaagccggaaggggcatactcgatcgtggaccgcaaggacgggatgaagcaatgggccaaggatggcatgcccctctatttctgggtcaaggacaagaagatgggcgacatcaccggtgacggcgtcaaggatgtatggaatgtcgccaagccgtaaggaaaggacgggctggatcgcatgaagccacccgcacccgaaaccttcgagggccagatcctggccctcctcccgtcgctcaggcgctattcccgcagcctgacccgctccgacagcgatggcgaggacctgctgcaggactgcgtcgaaaaggtgctcgcccgccgcgcgcagtggcgcgggctgaacctgcgcggctgggtgctgacgatcatgaccaatctttaccgaaaccagcgccgcaccgtcgcgcgccgtgacctggtcgatatagacggcgccgtggacgtggccgcgcccgagacatcgaccgacccgctcgagcgctcccgcctggaagacgcgctgaacggcctgtcggaagatcaccgcgccgtgctgatgctcgtcgtcatcgagggctatacctaccaggaagtggccggaatgctcgacataccctcgggcaccgtcatgtcgcgcctctcccgcgcccgacagcaactggccgaacacatgaaatcagacaacgtcattacgctcaggagaccgaaatgagcgccgccgaccaccccgtgaccgaagcggacctccacgcctacaccgacggcctcctgccggaacccgaccgcccgcgcatcgaggcatggctgcgcgacaaccccgacgatgccgcgaaaatcgccgagtggcaggcgcagaacgccggcatcaaggcgatgttctcgggctacgataaaggtagccccggcgatgccgacatgatcggccatagggtcggcgggtcacccgcgctttcgccctggtcgaagcgtctcggcgcggtcgcggcagccatcgtcgtctttgcggccggcacgctcgccggccattacggccccgctttgttcgagcgccccccattgcagctgacggcccaggagacctttccgagggaggcgcggaacgccttcctggtctatgccagcgaagtccgccatcccgtcgaggtcttcgccaacgaggaagcgcacctcgcgacctggctcggcaggcggctggcgatcgaaaacctcaaggtgcccgatctgaaaagcctgaactacaatctggtcggcggccgcctgctgcctgtcgatggcaagccgggcgcgatgttcatgtacgagaatcaggccggcgaacgcctcaccgtgctggtcggccgcaacgcctccaacagaacgacgagcttccgcttcgcctcgtcagacaatgtcgagaccttctactggatcgacggcgaactcggctacgccgtcaccggcgagatctcgcgcgaggaactgagaaaggtcgccgaggagtgctatcgccagtttccgccgtgatgtcaccgcaaggggacgaaggcgtcagcgttgcggatcattgtcgagcgtgatcggcttgccatgcggcgtcgcctccgccgcccgctgccaactccgctgcaaagccgcgatcgtcgtagcatcggcaacaccgcgatcgacgaggatcgaggacagcgccgccacccagcaatcgaaataatcgctgccatcctccgcccggccgggcttgtgcagctcaccggacaacgcctcggcccactcggtccatgaaaacagcccgcgctcgtgcagatgcaccgtcatcgcaaacgcctccgccgcccacggctccggaaacaccggctcgccatcctgggagcgcggcaactgcggtgactgggcaagcggcgagcgcgtatcacactggctcaagatagctctcccaagcatcgggtgaagagatggtcggtcatccggatttccttgtaccgtgacgaaaatggccaggacctttgtcttacgatcggggatttggtaccaagcgatctcttacaattccgaccacttcgtcaaacgcgatcttatcgtccatcaactgctcgacagcctttgcaacaagtagctttgcagcttcggcttgctgaggatcgcgatcgtacaagagcgtatagccattcaatgccaggaagtagcgtgcagcagcccaagccgtccgcttattgccttgtccgaaaccgtgagcctttcccacgccatagatcacatgcgcggcgagaacggcaaaatccgtctctccatatgaaaattggtttctggcgcgatcgattccggcttctatcgcccccatgtcacgaacaagatgaggctccccggtcgctcctacagcccgcttgttgaaatgaacgacatggtcagccgccacccaaacgggttcgtcgctcacttggcaagatgctccataatgacggcatcttcctcaagcagataatccatgaaagcgtcaggatcgaacggcacgggcttaatctcaaccgtggatttggcggcatcgcccccacttacggacgaaacatcggctcggctcgcggcagagccaacccgcccggtgcgagcatctccgcccacaaggacagaggccccagcgcgcgcgggtcgtgtctgcaaaccagctatggtgctctttttgctcatgcttgcaaatatagcgacaggctgtcacttgtcaaagatgcggaacgcgccatccattcactaaagtcacttccggtcccagcgatttttcattgcgccgaattcgactaactcagccgccggccggaaccagatagctctcccaggcatcgatcgacaccgtcagcgacgtatccgccccctcgccccagatctcggcgccgtcgaagacgacggtgtaaacccattgcggattctcgcccttgccatgcgcgttatcgtcgggaaacacgaaggagccctgcaccgcctcgatgacgccgaccttggcgcgcgcgtaacgcggcagccgcgtatgcgtcgtcggattgaagttccgcgtcctgacccggtcgccgatggcgaaccgcgctggctgatccagcggccgatcgcaaggaccgcccttggcaagaacaccggcgaccatatcggctttcagcacccgcttaggcgcggcgccgtcgaattgccggtggccgctttcgatctcctcggcgctggtaaagccgtgtcgctcgagcagcacctccagcgcccgcgtccagatctcgtaatagctggcggagagatagctggccggcggaatgctctctcgcgcatgccggctctcgtcgatattccaggcgccgaaagcgccgcaggagagcgtcagccccagcgcccgcctctcccactccgcgtggaaatagggctcatccttctcgggcgacacggcgccgaagcccatctgtccgccgagatcgtgcggcccgttcatgccgctgatcccggtgccgcggcaaggccggcgccgatcatcgcgtcacggctgacgagatcggccagctgctcctcgcccaagtcctcggtgccctcgggccgccgcggaatgacgagatagcgtagttccgccgtcgaatcccagacacggatcttctgcccctcgggcaggctgacgccgaattcggcaagcaccccgcgcggatcaatcaccgcccgggagcgataggccggcgccttgtaccagacgggcggcagccccagcaccgaccatggatagcaggagcacagcgtgcagacgacgagattgtgagtctcctcggtgttgaacaccgcgcgcatgtgctcgccctgccggccggtgtagccgaggctggcgatcgcggccgtcgcgtcgtgcttcagccattcggcgaagtcgggatcgctccaggccctggcaacgacccgggcgccattcctgggcccgaccttggtctggtaggtgtcgacgatggcgtcgatcgcggcgggatcgatcagccccttctccgtcagcaccgtctccagcgccttcacgcgggcctgcatgtcggaatagtggttgtcgtggtggtggtcatgcccatgcccatgatggtgatcatgatcatgttggtcgtcgtgatgttcgtggtcgtcgtgcaagagactaccctccgccagtgtcccgatatccttaggcactcgcacggcgcacgccaagccccggcgcgcgcgttctgcctatttcagcatcggccaaaggctcagcaccagaagcaccgccatggtgatgttgaaccacttcaaccgcaccggatcagagagccagtcacgcaaagcagaaccgaagccggcccaggtggacacgctgggcacgttgacgagcgcaaaggccagaccgacgatcagcacgctgacaaaatagatatcctggatcgtataggtcgccatcgccgtcaccgccatgacccaggccttcggattgacccactggaacgccgccgccgacaggaaggacatcggcttcaccacatccttgccttcgctgagcgaccgcgaggtcgcgatcttccaggcgatccagacaagataggcgccgcccgcgaatttcaacgcggtgtagaccgccggcaccgtatgcagcaccgcgccaagcccgagcccgacgccgatcaacagcgaaaagaacccggcgccgataccgatcatgtgcgggatcgtccggcgaaagccgaaattcacgccagaggtgaacagcatcatgttgttcggccccggcgtgatcgacgtggtgaaggcgaacagaagcagtgccagaaacgtatcgagcggcatggggggcaacctccgcggcccgagatcatcgccccgggccttgttaatttaggtcagcataattgacctaaattagagtttccagccatctattgtcatggtgacaggattgaagcggttgaattcgggatgcgtgtcatatgtcatccatcatcgatgatgtagaccacacaccgccaacataacgaggcccaccatgcaagacgatccgatcccaacgctgaccatgcgcgacggcacagaggtgccggtgcttggccagggcacctggaacatgggcgaaaaggcttccgaggccaagcgcgagatcgagagcctgcgcgccggtctcgatcttggcatggcgctgatcgacaccgccgagatgtatgccgaaggcggcgccgagacgatcgtcggcgaggcgatccgtggacgccgcgacgaggtctatctggtgagcaaggtctatccctggaatgccagccgcaagggcacgatcgaggcctgcgaaaacagcctgtcgcgcatgggcaccgaccgcatcgatctctatctcctgcactggcgcggcagccatccgctggcggaaaccgtcgaggctttcgagacgctgaaggctcagggcaagatcggccagtggggcgtctccaatttcgataccgacgacatggaggaactgctcagcgttcccgcgggcaacaatgtcgccgccaaccaggtgctctacaatctcggaaggcgcggcatcgagttcgatctcctgccgtggtgccaggagcgcaacattcccgtcatggcctactcgccgatcgagcagggccgcatcatccaccaccccgagatcatccgcatcgccaaggccaaccaggcgacgccggcgcagctggcgctggccttccttctggagcgtgacggcgtgatcgccatccccaagacgtcgaatgcggcccgcgtcactgagaaccgcgacgccgtctcgctcgacctcagcgacgaggacctggccgccctcgacgccgccttcccgcctccatccagaaaaaagccgctggagatgctctgacctccagcggcttcctatccaacggactctgtgtcgggccttacatcccctgcggtccacggttcatcgccgcgatcccggtgcggcagacctcgatcaggccgagcggcttcacgatcgccacgaactggtcgatcttcgaggacttgccggtcagttcgaggatgaaatgctcgacggtcgcatcgacgaccttggcatggaaggcatcggccaggcgcagcgtctcggcgcgcgtttcgccatcgccggccaccttgatcagcgccacctcgcgctcgatcggccgctcctgcccaagctcgcgcgcgcgcaccgtcagatcgacaacgcggtgcacgggaatgatgcgctcgagctgcgccttgatctgctccagcacctgcggcgtcccgcgtgtcacgatggtgatgcgcgacagatgcgcctggtgctcggtctccgacaccgtcaggctttcgatattgtaaccgcggccggaaaacaggccgatgacacgggcaagaacgcccggctcgttgtcgacgagaaccgaaagcgtgtggttctcgatggcagccgtttccggcgaaatgaagtaggcggagcccgtcggctgtaggtgtgcgttcatgtcttggtccgtttcctcagattatgtcaggacgccagctcgacgctgacggaattcatgtgtttttgagcaagcttgacgagacccttgtcgaaggtaaggaaggtctcgccggcagcggtgaggctgacgtgcagggcgtcggcgaagtccatgccggcttcgaaaccgtccagggctttcaggatatgctctcgttcgacaacgatgatggcgtcggtaccgagaacttgccgaagcagcccaacaatctgactgcgatccagcttcaacctgctcctgagaacccattcggtttcaagcaggacagtcggcagcacgaccaatcgaaacgtcgtcgtcagtcgagctgcctgtgcccattgagcgctgtcgtcccgagccagcaggcggacaaggatattggtgtcaatcgtccttgtcttcattccactggcgctccaaccgctcccaatccgcaattgccagttcgtcgatcgcctttcgtatcgcctcaggagacaggtcgacaggcggcccgtcgtatttcggaagactgtccaggaattcctgggccgtcatcaccttagggaaggcatcctgtcgctccgtctccaccggccgcaacacgaccccgcgcccgccatcgacgatctcgagttcggcacccggcttccagccgtgcgcatcacgaaccgcctgcggcagtggtacgctcccgttctccgatatcctcactctggccatggcacctgctcctcaaggaagggacgcgatcaatctagcgcgtcccctcgcttcgatcaaaccagctggcggcccttggcgtcgatggcgttggcgacggcctcgtcggtggcctcatccggcaaaagcatctcgttatgtgccttgcccgacgggatcatcgggaagcagttggcgagattggcgacgcggcaatcgaagatgacgggcttcttgacgtcgatcatctcctggatggttgcgtcgagatcgccgggcttttcgcagcgcaggccgacggcgccataggcttccgccagcttgacgaaatcgggcatcgcctcggtataggagttcgacaggcggttgccgtgcaagagctgctgccactggcgcaccatgcccatgtactggttgttcatgatgaagatcttgatcggcgcttcatactggatcgccgccgacatttcctggatgcacatctggatcgacgcgtcgccggcgatgtcgatgacgaggctttccggatgcgcgatctgcacgcccagcgccgccggcaggccgtagcccatcgttcccaggccacccgaggtcatccagcggttcggcttctcgaagccatagaactgcgccgcccacatctggtgctggccgacttcggtcgtgatgaaggtgtcgcgatccttggtcagcgcatagaggcgctccagcgcgtattgcggcatgatcacgtcgttattctgcgtgtaggcaaacgagttgcgcgcgcgccagcgggcgatatcggcccaccaatcggcgatctggctcttctccggcttcttcggcagggcacgccacaggcgaaccatgtcttccaggatattgccgacgtcgccacggatgggaacgtcgacgcggacgttcttgttgatcgacgacggatcgatgtcgatgtggatcttcttcgagttcggcgagaacgcgttcaggcggccggtgatgcggtcgtcgaagcgcgcgccgatgcagaccatgacgtcgcaatcgtgcatcgccatgttcgcctcgtaggagccgtgcatgccgagcatcttcagccagttcttgccggatgccggataggcgccgaggcccatcagcgtcgaggtgatcgggaaatcggtgagctcgaccagctcgcgcagcagcttggaagcctccggcccggagttgatgacgccgccgccggaatagatgatcggacgacgcgccttcgacatcagctcgatcgccgcatggatctggttcagatcgccctgaaccttcggctggtagctcttctgaatcgcgtgcgctgccggcggtgtgtaggtgccggtggcgaactgaacgtccttcggaatatcgaccagaacgggacccggacggcccgactgggcgatgcggaaagcttcatgaatgatcgccgccagatcgttgacgtccttgaccagccagttgtgcttggtgcaggggcgcgtgatgccgacggtatcggcttcctggaacgcgtcggagccgatcagcgaggtcggcacctggccggaaaggcagacgagcgggatcgaatccatcagcgcgtcctgcagcggcgtgaccgcattggtggcgccggggcctgacgtgacgagcatgacgccgaccttgccggtggagcgggcataaccttcggccgcgtggccggcgccctgctcgtgacgaacgaggatgtgcttgatctcgtcctgctggaagatctcgtcatagatcggaagcacggcaccgccgggatagccgaacaggtgttcgacaccattgtccttgagcgcgcggataacgatttccgcgcctgtcatcctgttatcgtccgtctgagtgtccgtgcccgtcatgtttttgttccattttgactgctgggatttgaaggtcttggcggcgagcctgaatttcaggcataaaaaaaggccccttggggagcctcttgtctagcgcatgggtggctgtcgccggatggttacaccatcctgcccatgcgctgtcccaccacaataagaattgctgctatcttcatggcgggaagtgatagacagaaaatttcgcagcgtcaacgcttaaagcaataaaaagccgacccttcaaatttatgggcatccggcgtcgccgcagcgccatggcaaagggtttattaaacgttcgcttatatcctcccctgcaatctcggggagtagccctttgcagaacaacgacttgcagacgtcaggcagcgcgggcgagcatgaccgccgcgacgcccttgcgccgggaaaccgtttcctcggccgtgtcgtcgcgtgcagcgggtcgcgcgccaccatcgccgccgtcgccgaagccggcggcaccgatctcaccgaactctggtccgtcggacgcctgatctcgataaccgtcggccgcaaccgcgtcgtggcgctcgtctattccatgaacacgggcacgcatgcctggggcgaaggcgaggacaactatttcaagatcgagaccgagctgctcggcgaggtccgcgtcgacgaggacggcacggagcaattctccaccggcatctcgcgctatccctatctcggcgccgtcgcgcaccgcatccgctcctccgacctgatgcggatctacgatgccggcacgggaaccaccgccgtcatcggcaagctgacgcaggacgaaagcatcgatgcgtcgatccacgtcccctccatgctgtcgaaacacttcgccatcgtcggctcgaccggcgtcggcaaatcgaccgccgtgtcgctgctcttgcacaaggcgatcgaggccgaccccaagctgcgtgtcctgatcctcgacccgcacaacgaattcgccgccgcctttcccaggcattccgtcgtcgtcgatacggacacgctcgacctgcccttctggctgatgcgcctggaggaattcgccgaagtcgtcttccgtggccgcacgccggtgccggaagagctcgacatgctgcgcgacatcctgccggaagccaaacgcgctttccgcggcagcgacaattcgctggtccgccgcaccaccgagaagagctcgatcaccgccgacacgcccgtcccctatcgcatggccgatctcctggcgctgatcgacgagcgcatcggccgtctggaaggtcgcggagaaaagccgttcctgcggtcgctgaagatgcgcatcatcgcggcgatcaacgacccgcgctaccacttcatgttctccaacaacacgatctcggatacgatcatggagacggtggccgagatcttccgcgtgcccggcgacaacaagccgatctgcaccttccagctctccggcatcccatccgaggtcgtcaattcggtggcgtcggtgctgtgccgcatggcattcgaaatcgcgctgtggagcgatggcgccatccacatgctggtggtctgcgaagaagcgcaccgctacattccgtccgaccccacgctcggtttcttcccgacgcgccaggcgattgcccgcatcgccaaggaaggccgcaagtacggcgtctcgctcggcatcatcacgcagcgcccgggcgaactcgaccagaccatcctgtcgcagtgctcgacgctgtttgccatgcgcctcgccaacgatcgcgaccaggagatcatccgctccgccatcccgaattcctcgatctcgacgacaagcttcatctcctcgatcggcaatggcgaagccatcgcattcggcgaggcgatcagcgtgccgatgcgcatgcgcttctcccgcgtcagcgaagacctgctgcccaaggccaacggcgcgacgccgaaattcaccgaggaagatcccgataacgtcgatctgcgcaagatcgtcacccgcatgcgcgccgtcagcggccccgatatctcggccttccagcaaagcgtcaagaacgccggccacggcctgtcgggagaagacgacgatacggaatacgatcaggtcttcaacgccgacgtctatccgccgatcatcccggccccgatccctaacacgccgccgctcgcaccgatcgaaccataccgccgcgacatgctgccgacggccccgatctcccgcgaaccggtcacaccgccgaagccatcgcgcgaatccttcggcgtcgccgccgacacctcgatcgaaagccggctggaagcgctgaggcgcgagatgcgcggcgaacaaaatcccgccccgcgacccgccgacccgccatcacagcagcagccagcgagcattcgccgcgaacccggcgtatcgctgcgcgaaagcatcctcaaaaagccgttgagcagcctctacgacaaggattgagcgggcggccggccgctagactagctccgccgttcccagctctcgtccatctggttgcgaaaccacgtcatctgccgcttcgcatattgccgcgtcgccgcggcacccttttccagcacatcggcgcgcgacatcgtgccgtcgagcatggcggcgacctgcggcacgccgatcgccttcatgaccggcatctccggtggaagcgacaaggccagaagcgccctcacctcgtcggccgcaccctcagccagcatcagttcgaaacgccggttgatgcggtcgtgcagcacgccgcgctccggcagaaccacgatcttgcgcgctctatcgggatcgatcacgacgggccctgactgcccctgcagctcggcgatcgaccgtcccgtcacctccagcacctccagcgcccggacgatccgctggccatcctgcggattgagcgccgccgccacgcctgcgtcgcgctgcgaaagctccgcgtgcagcaccgcgccgccttcctcgatcagccgggtccgcagccgcgcgcggatatcttccgggatcaccggcatgtcggaaaggccaccggtcagcgccttgaaatagagccccgtcccgccgacgaagacaggcagacgaccgtccgcccgcagtcgaggcagaagtgcggtgacatcgcgcagccacgcgccggtcgaataggcggtcgcggcgggcacatggccgtagagatgatgcggcacgccctgcatctcctcgtccgatggccgcgcggtgagcacccgcagcgtgtcgtagacctgcatgctgtcggcattgatcacgacgccatcgtgacgtttcgcgaactcgacggccagcgcggacttgccgctggccgtcggcccggttatcaggatcgcatccattgcgttcagaaggttttccatcatggctctcgttgccacgcttgttgccaatccgtcaaatcctgttctgacagccgccatcgccgagaaggccgccgacgccgccagggcatccggtctctactggctggccgacggagtagcctgcgatatcgcgctgcgcgatggtaccgatgcgacagccgcccacgccgcgatagcagccgtcatcgccggcgccccgatcgatctcgtcattcaggatcaggacacgcgccgcaagaagcttttgatcgccgacatggattcgaccatgatcggccaggaatgcatcgacgaactggcggccgaggtcggcctcaaggacaaggtggccgcgatcaccgcccgcgccatgaacggcgagatcgccttcgagccggcattgcgcgaacgcgtcgcgctcttgaagggcttgccgatctcggtcgtcgacgaggtgatcgccaagcgcatcacgctgacgccgggtggaatggagctgatcgcgacgatgaaggcaaagggctattacacggcgctggtctccggaggcttcaccgtcttcaccagccgcatcgccgccaccctcggcttcgacgaagaccgcgccaacatcctgctcgaggaaaacggccatctcaccggcttcgtcgccgagccgatcctcggcaagcaggcgaaagtcgatgcgctcgaggatatctcgaagaaactcggcatctcccccgaggaggcgatggccgtcggcgacggcgccaacgatctcggcatgctgcacatcgccggatcgggcgtcgccctccacgccaagccggccgtcgcggccgaagcgaaaattcagatcaaccacgccgacctcagtgcccttctctacatccagggctatcgcaagacggatttcgtgacggtgtgacgtcggattggtcaccacttaggccactccaatcctacttggcatatccaacgtgccaaccgaccatcagacagatgcaatcagagctggcagtgaatacttccaggcgattgcaacctgcgctatcctgcacgcatagaacattgcactttacaaatttgtacgtacaatattgtgaggcattcgcatgccgcaatttatatggaacgagcaaaagagccgtagcaacaagctgaagcacggcatttcatttgaaacggctgcactcatctggagcgatccaaattatctgcttgttccggatgctgtttatgatggcgaagagagatggctggcgatcggcaggactggcataacaaccgtcttggtcgcagtgcatacgtcgtatgatgatgacggcgaggaaaccattcgcattatcagcgccagaaaggcgacggcacatgagagaaagcaatacgaaaagtcgatcgctcactgagttgcagcaggccgaactcgacgctctcgacgctcttgccgatgaggcaatcgacacgagcgatatcccggagattaccgacgagcgttggacgcttgcgcgcaagggtcaactctaccgtccggtcaagcaatccgtaacgatccgcctggatgcggatattcttgaatggtttaaaagccacgcccaagggcgcggctatcagaccgagatcaacaacgccttgcgccgctatatcgccgagcaactcaaacgcagcggctgacgccgccctactccatcggcaccgcgacgaagcgcaggtcgccattcgccgatgcgatcatcatctgcgcgttgcgccggccttcctgcttcagcgactgcaccttggcaacgaccgtctccggcgagcgcatgaactcctgcgccacctcgacgatcacgtcgccggccttcaggcccttttcgtccgcaagcgagcccggcttgacctcggagacgagcacgccatcgacgctctcggcgataccgaagctcttgcggttatccgcattgagcgccgatagcgacaggccgagaatgttcttcgcatcgcccacctcgggcgccggctgcgcgggtttatccttgttgtcgggcgtcgggtgcgcctgatcgtcgttctggtcgtccatatcctgattttcgttgggatcgggattgatcacgccgccatcgttttccgaactgtccgccgccgcctgatcgctgtcttcgagacggccgagcgtgaccttgaccgtctgctccttgccgtcgcgcagcaccacgacatcgaccgccttgccgacggggctttccgccacgacgcgcggcaggtcgcgcatctcgttgacggccttgccgtcgaatttcaggatgacgtcgccggccttgatcgagccgtcgtcgaccggcccgcccttgatgacgcccgcgaccagcgcgcccctggcgctggaaaggccgaggctgtcggcaatgtcgtcggtcaccggctggatgcgaacgccgagccagccgcggcgcgtctcgccgaattcacgcaactgctgcaccacgcccgccgccagctccgccggcaccgagaagccgatgccgatcgagccgccgctcggcgagatgatcgccgtgttgatgccgatcacctctcccttcatgttgaagagcgggccgccggaattgcccttgttgatcgccgcgtcggtctggatgaaattgtcgtaggggcccgcattgatattgcgcccgcgtcccgagatgatgccgacggtgaccgaaccgccgaagccgaacgggttgccgatcgccatgacccagtcgccgatgcgcatgacgctggaatcgccgaactgcaccgccttcagtggcttcttcggctccaccttcaagacggcgaggtcggtcttggtatcggtgccgatcagcttggccttgagcttggtgccgtcggcgaagttgatctcgatgtcgtcggcgccgtcgataacgtggttgttggtgacgatcagcccctgcgggtcgatcacgaagccggagccgagcgaactgacattgtggttgctgccgggcttgcccttctgcttgttgaagaagtcgttgaagaactcctggaaaggcgatccgtcgggcgcgcgcggcgcgggaccggccccttcgtcgtccttgacgttctgcgatgtcgagatgttcacgaccgcgtcgagcagtccttcggcgagatcggcaaccgaggccggaccattggtcggcggtgtgctctgtgcctgagaaaccccggcaaagccgacattggccagcagtgccgccccggccagaagcgcgagcgatcgtctgaaggtcgggcgggtcgtgggggccatcaagcatcctcatgtgtgtcaaaagcgcactctgatcatgagcataaggcgtaatgatggagggtgaaatcaccttttcgcgaaatcccgtgcaatctgctcggggtgtccgcgaagtccaggagagcgggcgcaataccctaaaaataaaggggccggcaagatgccggccccaagaagtcttcggatgatggcgatcagttcgccggtgcggccggaaccgcgggcaggctcggctccgccgacgaacccggctgaccgctcgggctgttgaagtagcggaagaaatccgagttcggcgacagaaccagcgtcgtgtcctgcgaggacatcgccgtggtataggccgccatcgagcggtagaactcgaagaagccggggttcttgctgaaggcatcggcgaacagccggctgcgttccgcttcgccctcaccgcgcaggatttcagaatcacgctgcgcggcggcggtgatctcgacaacctgtcggtcggcgatggcccggcggcgctggccttcttcggtaccctgcgcgcgcaggagttccgcttcggcaagacgctcggcgcgcatgcggtcataggtcttcggcgcgacttcacgcgtcagatccgtacgacggatgcgaacgtcctggatgttgaggccgagtgcctcggcatccccacgcaggtcgtcgcgcacttcgagcatcatcgccacgcgctcttcggaaagagcggcatcgaaatcacgcagaccgtagacgcggcgcagcgatgaatcgagctgcgtgcgaagacgcgcctcggccgattcgcggtcgcccgaaaccgtctcgcggaagcggcggacatccttgatgtcgtagatcacgaaggcatcgacatcgaaggtcgcgccgccgcgcacctggacgcggatgttgtcgaggtcgagacgaagcgcctgcttttcgacgatctggacacggtcggcgtccatgaaggtgaagggcagcttgaagtagatgcccggctcggtcttcaccgactggatctgaccgaagcggacgacgatcgcctgctcgcgcgcattgaccacgaagatcgaagagtagagcgccatgagcaccacggcgaacaccacgaggaaaatgggaagtttattcgacgtcatggatcaacctccctgctgcgccggtttaccgatttcgttgagcggcagatagggcacgaccccctgcttctcgtcgatgatgaccttcttggagttcttcagcacctgctccatggtttcgaggaacagtcgcttgcgggtcacttcgggagccttgctgtattggtcactgacggaactgaagcgctgcgcctcaccttccgcttccttcacgacgcgatccttgtatgcggcggccgcttcccggatctgcgccgcgtcaccgcgggcctggccgagcttctggttggcatactggttcgcttcctcgacgaggcgctgcttgtcctggtcggcacgctgcacttcttcgaaggcgtcggcgacttcacgcggcggcgcgacgtcctgaatggtgatcgcattgatcgagatgccgctcttgtagcgatccatggtgccctgcacgatggcggccacttcggtttcgatcggctgacggttgtcgcggaacgcgtcctgagccggacggcggccgacgacttcgcgcatggcgctttcggcgacctgctgcagcgtctcggccggattttcgacgttgaagagataggccttcgggtccgtcacggtgaagaacaccgagaactggacgttgaggatgttctggtcgcccgacagcatcaggccgttcgacgaagacgaggacgtcgcgccgacattctgctgctggaccgtgaccttgacgatttccaccgtctccatcggccatacgatgaagtgcaggccgggcgcggagacttcctgcttcgggctaccgaaacgcagttccacgccgcgctcgtccggctggacgatgtagatgctctggaaaagccagaacaccaggatgacagccgcgacgatcagaaggacgccggtgttgaacccgccgggcacagcgccgcgcagccggtcctgaccacgacggatcatctcttccagatcgggtgggccgccttttccgccgccaccaccgccaccgccgcgaggacgattcggcccctgcccccatggtccctgattatttccaccaccgccgccgccgccccaagggccgccgccgccattctgattgctccagggcatcaaaacctcgttgttcgttacactttgcgatcgcttaacccacgggggcgacggatattcgcgctcgagaccgttataggtatcgctgcatcggctttcaacgcagcatgaggaagttggggatgtttattggaaaatagtttcttttcgccgctcaacgcctgtcataaacgacataacgcgtggcgtagctgtctttctcgccctcgggaacgccgatgctttcgccggcgcgccagatcgccgggtcgatcgcgggaaaggcagtatccccgtccacgtccgtttccacatgcgtcacgcaaagacgatcggcgatcgccatcgcctgatcgtagatctgcccgccaccgacgatgcagatctcgtcttcacccctttcgaccgccagccgctcggccagcgccaccgcctcgtcgagcgaaccgacggtgctgacgtcgggatggtcgatcgtgacggaccgcgagatcaccacgttcggccgcccgggaagaggcttgccgatcgaatcataggtcttgcgccccatgatgacgggctttcctgttgtcagcgccttgaaccgcttcagatcggtcgagagccgccacggcatgtcgccgtcgcggccgatgatgccgttgcgcgctgccgcgaccacgatcgtcttgcggatatcggacatgtaacctctcgatcagaccgcgatcggcgccttgatgctggcgtcggcctcgtagccgaccagttcgaaatcctcgaaggtgaagccgaagatgtccttcacctcgggattgatgcgcatgaacggcagcggcttcggcttgcgcgtcagctgcagcttcgcctgctcgaaatggttatgatagatgtgcgtgtcgccgagcgtatgcacgaagtcgccgagcttcagcccggtcacctgcgcgatcatcatcgtcagcagcgcgtaggaggcgatgttgaagggcacgccaagaaacacgtcagccgagcgctgatagagctggcaagagagcttgccgtcggcgacatagaactggaacaggcagtggcacggcggcagcgccatgttgtcgacttcggctgggttccaggccgaaacgatgtggcggcgcgaattcgggttcttgatcaggctggaaacgagattttcgatctggtcgatgtgcccgccgtctggcgccggccaggagcgccactgcgcgccgtaaacggggccgagatcgccgttctcgtcggcccactcgtcccagatcgagacgccatgctccttgagataggcgatattggtgtcgcccttcaggaaccacagcagttcatggatgatcgagcgcaggtgcagcttcttggtggtgaggacgggaaagccctcctgcaggtcgaagcgcatctggtagccgaacaccgaacgcgtgccggttccggtccggtcgccgcggtcggttcccgcttccatcacgtggttcaagagatcgagatactgcttcatcgcccgccgccgattccatttttcccatatttaagccgatcggccgtcaaaaccaatcacgccccatgtttttcccgatgattccttacgggaccacgatgcttttgtgacgatggctcttcccatgcgatcaggaaaacactatatcagccgtgccagtcctcggattggctatggcgataaatgagcggtgtaataaacctattggacccgggggcggtacccggcgcctccaccaaaaaccggcggccttgcatagagatggccggcttttgatgggggcgaaacaggatcgacaagggtgtaaagatcgtctttttgctcggcattgtaccgccgttatcgggctaaaattgtagttgcaaacgacaactatgcggaagctcgtctcgctgcttaatcgcggtgtgacacttcaactaaagccctagtggttcgcacctctaggcggggtccgaaggcacctggcaacagaagccttcaccttctcccccaagctcaaatcatgtatgatttgctaaagcatgactcggctgcgggcttttccaagctgcttgagcatggcatataggcttggaacagacgtacggacgaaagaaagacaggaaaagcatggggcaggatcacatccgctacgacattctggcacaggacgcgcttcgcggcgtcatccgcaaggtattgtcggaagtcgcggcgaccggccgcctgccgggcgagcatcatttcttcatcacctttctgaccggcgcccccggcgttcgcatctcgcaggccctcaagtcaaagtatcccgagcagatgaccatcgtcatccagcaccagttctgggaaatgaaggtcaccgaatcgagcttcgagatcggcctctccttctcagacgtgccggaaaagctcttcatcccgttcaatgccatccgcggcttctacgatccgtcggtcaatttcgaactcgaattcgacgtgccgctcgccgatagcgacgagctgccggaagccgagatcaccgcctacccggtgaccgccgagaaaatggaaaagaccgaggacgcggccggcaagccggccgagggcgacgagaagaaagccggatcggtcgtctctctcgatgccttccgcaagaagcagtaagaccaagggaagcaattgcttccctttttcatatgggtgtcccgtgagcgccgaaatcgtcaatctccgccagttcaagaagaagcaggcccgctccgacaaggacaggcaggccgagcagaaccgcatctcctttggccgcaccaaaagcgagaagaagctcaccagggcgttgaacgacaaggccgaacgcgcgcacgaccagggccggatcgacaagaacgacgacgccgaatgattgcgcgggcgaacgaaaaagagtccgcgatcaagcctttgcacccgtgtgcggattcgttttccgaacaatccgcgcaatgatccgcaagcactcgatcacgctgcacggccatcgcaccagcctgtcgctggaagatgagttctgggccgagctcaacgccatcgccaccgcccgcgccatcccgctcgccggcctgatttccgaaatcgacgatatcagggacgccgacagcaacctgtcctcggcgctgcgcctctacgttctcgcctggctgaaatcgacggccgccaccccaccggaaggccgagacggcgacagggaagcggcggatgccggagcgcgttgagatcgtaccctatgacgcagagtggccgacgcacttccgcgaaatcgccgcctccctgaaaaccctcctgggcgatcgcgtgctcgatatccaccacatcggcagcacctcgatccccggcgtcgccgccaagccgctgatcgatatcgatgtgatactgcccaccgcagccgacgtcatcgacgcctgcccactgatggaaacgaccggttacgagccgcgtggcaatcgctacgatgcggatatcttcgcattcatgaagcacactgctgcgcccaggcagcggatctacctctgccccgaaggccacgacacgcaccagcggcgcatactattccgcgattatctgagaacccacccgcaagccgccgccgactatcaggcgttgaagctcgagctggtcgaagccttcgaatatgacggcgacggctacaccgccgccaaggccgccttcgtcaacgatatcgtcgcccgcgccggccggcgctgaagctcaccgacagcagaaagccgagaccgcgaggcaaaacactattgcggaagctgcacgccgggcaatcctggcaccgtgttgaagttcagcgagttctgcggcggcgtgatctgctgttcctgcgccttgcgcgccgcctcggccgcggccctggcatcctcttccgccttggccttcgcggcggcttcggcctgcgccttggcttgcgcctgcgcccgcgcatccgcggccgccttgtcgcgctcggcctgttctgccgccagcagcctcagccgctcctcttccgccttgcgctgttcctcgatgacggcggccttttcgcgctgctgctcgttgaacttggcaagcgacacttcgcggcgcagccgctgctgctcgagaacgttcgactgcagcttctcgacccgccggcgctcgcgctcgaaggcgcgcagcgagagatagccggtaatgtcggtgacatccaccacccggcccggcgatccgagaacgccggaaaagtcgatccgtatcgacggatccgcgccggtgagcgcctcgctcagcggattgaggccgataccgagcgatgcgttgatccgctcctgcggcagatcgatctgcgcgttgcccgtcagcttcgcctggtccgtcgcgaccgtcacgttctggaccctcagcaccccgtccgtcacattgaacggcaccgtcgtcggcggcagcttcgcctcgccgttgttgagcagcgtctcgacgatcgggtgcaccttgccggcattcaattgatcgcgcatcggatcggtggccgacagaagcggcgccagcatgccgagattgagcccgcgcacgctggtatcgcccagacgcatctcgccggagccggtgagcgagctggcgatatccttcatcgacttgccggatgcctccatcgacagcgccagcccgaacctgcccgaggcaaccggcgaaccgccgtcccgctgccacacgacaccgccgagatcggcatcggcaagcgcaagcttggtctgcaggaagccggttccatccgcgttggtgaaggtcacattgccatcgacggtgccgccgtcccacccgcccttcatgtcgttcaggcgaatctcgtcacccttgtaggcgacgttggaggtgaagtcggtgatcgggttcggccaacccagccagaactgcttggccgcgagtttcaggttgacgtcgatgtccttgaacacgggaatgccgagcggcgccgacgaaaggttgccgctcgcggcatccgtcatcggcccgtagaccgcgtccccgagccaggtggcgtcggccttcgtcaatgagagttcgcccgacgccgtcgtgcgttccgccttgcgatcaagcgtcatggcgccggtgaaatcgttgtccgccgcgcggcccgcgatattgccgaaggcgaccttgtcgccatcgatcgtcgccgtcgtcgtcagcttgaacggcagaccggcccccgtctgcggcacgccgacgccgttcatgaccagataggggtcgagatcggcgctctccagcgacagcgccagctggccgttcatgaagctctgcggccggatatcgaccttgccgcccgcggtaaacgaggtgcggtcggtcgcgaacgtcaggaccgcatcggcgggatcggttccctccgcctgcaccttcagcgtcatgcggccattcgcatccgcgtcgacgggcagcggatcgagccccgcctggccgaacagcaccgacgtcacattgttttcgagcgtcgcctcgaggctcgtcgtgcccttgccggtcaacgccagcaggtcggacatgcgatagtcgaggttcacgcggctgccgttggtgacacctgcgagcgtcaccgagaggccgtcgccctgttcgccgccgagcgtcacggcgccgcgcagcgccgtgttggtgtaccaggccgcgttgcgcaccagccggtccatgacgggatgctgtggcagcttctgcttcagcatcgtgaagaacggaccgggatcggcggccttgaaggtgatctcgcccgagcccttgtagtcgagcagcgaaccctcggcgcgccccgtcgccgtcagttccgcgcccgccaggttcttcacggcgagcttctccacgccgagcgcgccgtcggcgatcgtgaagctcgtctcgacatcgccggcatcgacgccgaaggccgtgaacttgtcggccttgagctgcgcccggatcctgtggtcgagaacgttattgcccgcgtcctgcccggtaaacaggcccgtcaacgcgcgcagcgcatcgagatcgagcgcatcgccggcaagcgcgacgtcgagcgtcggcgcctggttcgcgacgacctgccggtcgagcctgcccttcagcgtcgccgggccaaccgcgatctcgagatcgtcgaacgtctgccgttcatgcgtcaggttgacgttggccgagaaaccggcctgctgcagctgccggatggccggatcgacctcacccgacagccacgaggcaagcccggtcggctgcttggaggcgacggtgatcgcgcccttgaaggagggctgcccctgcagggccagctgaccattgccctcgacgagggtgcgccccggcagcgtgccgaacgcgttgtcgatcgtccagccgctgccggccggttcgagatcgagctgcacgtcgcgaatggtggcatcgccggcaacgatcgcgggcagccgcacgctcgccttgcccggcacctgcggcaccgggatctgcgagacgatctggatcagcgcattcagccgctgcttggccgacaggctcggatcgcgagacgtcttgccgttggagccctggttgccgatacggttgacgtcgatctgctgcccgtccgccttgagcaggaattgcggcttcacgccggtatcgagcgttgcctcgccggtgatcacgtaaggatcgtcgagcgcgccgatctccaggcggtaatcgggaatgcggatgctctcgttcgtcagctcgaacttgcccttcaggcgcggcggcggctggctcttgtcgctgcccttgggcttgttggtgctggcgcgttcgatctgcgccgacatcgtgccctggtagttgggcttgcggtcgacgagcttcagctcgccgtcgagatcgaccgtcaccggctgtttgtcgggctgcaggcgcgtgcgcatgcggatgatgccgttgtcgtccagctggttgctggatatcaggaacttgccggtttcgccgtcgagcgccgcgtcgccttcgatccgccatggcccggcgagcgatttcgccgacatctcggcattcagtcccgtcacaaggcgcgtgcgccccgattgatcgtcgatgaactggatatcgccgccggttaccctgacattctcgaggatgacggtcttcgccggaatttccggctggctgccgcgcgtccagtcgagcgtgccgtccttgagcaggcggagcttgaccttgggattgaccacgcgcatgtcgaagatcagcgcctcgccggagaggaacggcgcgagttccgcgtccatggaaaactgctcgacctgcacgatcggcgagccgtcctgttcctggccgacgcgcacgtcgtgcatcgtcaccgaagggaacggcaacaggcgcgcattgacggcgccgtagacgaccaccttcttgccgatgatacggctggcctgatcctcgaaattcttgcggaagccggtccaatcgatgaacatcggcgcgaacagcgccacgaacagcgccaccacaaccacaccacccagtacgacgagaaaccggcctaccaagtcaatcattctccattcgggctacaccgcggacaccaggataaaaacgcaatcgggatagagatgccgattgcgtttcgaccctagatcatcaacccgaagcgtgtgaagccgctttcaggcaacagaccgcgcaattccttgttacgcccgcgctttcccggcggcgctccgattcgctacgctgttcctaatccctatcggcattcatgccgcaagcaagccaagatcaacagattgttgattttcaggcagaatggaaaatcttgcccggattgaagatgttgtcggggtcgagcgcatgcttgacctggcgcatgagatcgaccgcgccgccaagctcttcctcgagaaacgccatcttgccctggccgatgccgtgctcgcccgtgcaggtaccgtccatcgaaagcgcccgcttgttgagccgcgccacgaaaccctcggcaacggcgatcccctcctccgtcttgtcgtcgaacaggagcagcacgtggaagttcccgtcgccggcatgaccgacgatcatcgccagcaggccatgcgcctcgatatcggcctgcgtctcgccgatgcagtctgccaggcgcgagatcggcacgcagacgtcggtggacagcgccgccatctccggcgccagcgcccgcgacgcccagtaggcgtcgtggcgggctttccagagcttgttgcgctcctcggcgttgacagtccaggcgaacgcgccgccgccgcactcggccgcgatctcgccgaactgcgccgattgcagcgcaactgtttcgtcggtgccgtggaactccacgaacagcgtcggcttctcgtcgtagttcagtttcgaataggcgttgcaggcgcggatctgcagggcgtccaaaagctcgatgcgcgcgacgggcacgcccatctggatcgtcatgatcacggcgtcgcaggccgcgcgcaccgtcggaaacgcacagacgccgccgccgatcttctgcggaataccctgcaggcgcagcgtcaccgaggtgaggatgccgagcgtgccctcggagccgacgaacagccgcgtcaggtcataccccgccgaggacttgcgggcgcgccgcgccgtgcggatttcctcgccattggcggtgacggcggtcaccgagagcacgttgtccttcatcgtgccgtagcgcaccgcgttggtgcccgacgcacgcgtcgccgtcatcccgccgatcgaggcgttggcgccgggatcgatcgggaaaaacaggccggtatcgcgcagatgggtgttgagatcctcgcgggtgacgcccggctccaccgtgcagtcgaggtcttccatgttgacctcgatcacccggttcatccggctgaaatcgatcgagatgccgccgttcggcgcattgacctgcccttccagagaggagccggtgccgaagccgatgacaggaaccttgtgctccgcgcagaccttgaccgcagccttcacgtcgtcggcgctctcggcgaagaggacgccatcaggcagttgcgagggaatataggtcgtcgtgtgcgcatgctgctcgcgaaacgactggccggtctggaagcgctcgccgaagctctgcttcaggatgccgaggacgctggcgatgcccgcctcgttgcgtctgccggccttcgcatctttgagcgccatctctttgatctccttaccatcgctgcctggaggcaggttggtatgagacaagagatgacgcctgtctagatgcaggccttcgcgacgccggtctttcgcggccgatttcggaggaagcacgcatttcgcgatcaacccaggatacaggacgccaacaattcgcaattgacccgcggccccgcccgcgcctatatccacccacaccatcggcgcccgccgattttccagtacagcctctgccgcctccccagacatcgcatagccggcatcagcattggcaagacatgcatcggacaagccgttgaagaacgccagccgcaaactccgaaacgccagccttcctcgctgggcgttgctgctgacactctcgaccgttctcgtcgtcggcctggaattgctcggcctgcccgcctcgctcctgatcggcccgatggtcgcggcgatcgtactcgccgtctcgatcggccagggatcgctgcgcgtcccgcgctggccgctgcttttcggccaggcgctggtcggtttcatgatggcccgctcgatcaccgtcgacatccttcagacgatggcgaccgacgcgccgctcttccttgccatgatcttcgccgtcatcgccgccgccggcctgctcggctggctgctcacacgctggcaggtgctgccgggcacgacggcggtctggggctcgtcgccgggcgcggcatcggccatggtcatcatgtcggaggcctatggcgccgacgcgcgcctcgtcgccttcatgcaatatctgcgcgtcgtcttcgtcgccgtcgccgcctcggtcgtctcccgcctgtgggtagccgccgatggcggcgagccgccgccactgatcctctttccgccgatcgactggccggcccttgccgcgaccgttgcgctcacctgcctgtcggcttattgcgcgacgcgcttccgcattcccggcggcaccatcatcgtctcgctgttcacgggctcgctgctgcagggcctcggcctgttgaagatcgagctgcccatgtggcttctggcgatcagctatgccttgatcggctggagcatcggcctgcgcttcacccgggggatcatcgcccacgcggcccgcgccctgccgcgcgtggccggatcgatcctgatactgatgtcgctctgtggcttgatggcctatgcgctgcatgtcttcgccggcgtcgatccgctgaccgcctatctcgccaccagccccggcggcgccgattccgtcgccatcatcgccgcctccagcaatgtcgacgtccccttcgtgatggccatgcagaccggccgcctgctcatcatcctgctgaccggcccgatgctcgcgcgcttcatcgcccggcgctccggcctagccgaaaatcctgtctagcggtgagcccgccccagccccgcccattgccccggcgtcatgccataggccttcttgaaatgccgattgagatggctctggtcggcaaagccggtggcaagcgccgcctccgcaagcgcctccccggcaccgatcatcgcgcgcgcctgctgtagccgccgcatcaacagatagcggtgcggactggtcgcgaaggcagccctgaaatgccgtgccagctgaaaccggtcgagccccgtcacggcctccagttcgcccgatgtcaccgcccgcgtagcatgcgcctcgagataatcccgcgccagtcgcgcgcgccgccaggcaatgcttccaagcggtcgaggcggggtgccggcatgccgagccagaccgccggccacgcgtgacacgaaatcgtcgacgaagagttcatccagctcccgatccagttcgccgagcgccgccagaagcgtgccggcgagactgggatcgctgaccacgggctgatcgacgaacggcaggccgatccgcgccgcttcgagacaatcgaaaagcagcgccggctccagatagagcatgcgatattgcagcccgtgatcggtccccgccccgccatcatgctcttcgtcgggatgcaggacgatcacctgccccggcaggctgaaacgccgctcgccacgataggaaaaggtctgcacgcccttgatcgtcaccccaagcgcataggtatcgtgacgatgcggctcgaaggcgttgccggcgaactgcgcctcgatgcgctctatgccgggaaaggccggcgcggtgacgatccctggtgcaatcgtaccagctgcaatcgcgccggatgcgatcacgcgcccggcgtcacccggcgcggtgcacaaacgttcaagaccctcgagggcgtgatggcttagatcctcgtccaaccgacgtcgaaacccgcatgaaaagagactggaatgtttgataccaaaattgcgatcgtgctgcgaaacaatcttgcctcctggcagacgctgaacgtcacggccttcctgataagcgggatcaccggccagaaccccgaaatcatcggcgacgcctacaaggaccgatccggcaatctctacaacccgctgtcgatccagccgatcatcgtcctcgccgccccgccggagaccatgtccgccatccaccgccgcacgctggagcgcggcgtccccgcctcgctgttcatcgaggagatgttttcgaccggccacgacgccgccaaccgcgccgtcttcgccgaatatgcgcccgacgacgccagggtggtcggcatcgccattcgcgccgacaggaagatcgtcgacaagatcaccaagggcgcggtcatgcacccgtaacgcaaaacggccgggcgtctggcccggccgtccaatggcgagagaatggcgcgatcagccccggggtgatcgagccgatcagccctgggtgatcggcgcgatctggatttcgacacggcggttctgcgaacgcccggcttccgaagcgttggaggccaccggctgcgacgggccgaagccgaccgccgacatgcggcgctggtcgatgccctggccgccgagataaccggcgacggattcggcgcggcgctgcgacagatcctggttgtactgcaggccgccggtcgaatcggtatggccgttgacgtcgacgagcgtgcggttgaacttgcgcagcacgaccgcgaccgagttcagcgtctggtagaagcccggcttcacggcatactggtcgacgtcgaaggtgatgttcgacggcatgttcaggatgatgttgtcgccgttgcgggtcaccgagatgccggtgccctggagctgcgcgcgcagttccgattcctgctggtccatgtagttgccgatcgcgccgccggcgagagcgccgacaccggcgccgatcagcgccgcgttacgccggccgaccggcgaaccgccgacggcaagacccgccagagcgccgacgccggcgccgagcagcgcgccgcccgatgtgttcgacatcttttgctggcccgtatacggatctgtcgtcgtgcagccgctgaggtaggtggcggcaacggccaggagaatgaatttcttgatcatggacaggcgtatctccaattcgatggtgatgcgagcagtattaaggaatgcggcaagaagatgaagcgcacgccctgcatattgaaaaatcgatgcattgcacagccttagagacgaaattcccgaaagtggccgacgccggcgaggccggcgctggcgttcgggacacgcttcgggcgcctgcggcgacgcgtcagaaattctggaacagctgccgcaccgtgtcgtaggtggcgttcgcgatgttcagcgattgcaggccgagttgctgctgcgtctgcagcgcggcgagccggctcgattgctcttccatgttggcatcgatcagcttgctcatgccgcgcgcgaaggcatcgcccatcgactgcgcgaaatcgctctgcaggctgatgcgcttctccagcgcgccgaacgacgagccgatcgtcgccatctgcccgagcatcttgtcgaccacggtcaccatctcgcgcacctccgccgtcgtcgtcgccgaggatatgccgatctcgacctgcccggccgtattgccggcgcccgccagcatcacatagttcttcgaggcgcccgcttcggtggcgaaatactgtgatgtcagcgccccgtattcgccggacccggtgcttcggtcgtcgatcaggtagcgcgcatccttggacgacgtggatcccacgggcgcgatgtcgacctcgtagctcagcgtcccgatttccacgcttccatcggcgagccgcgtgaacgacgccgggatctcccgcggccttgccggatcgtcaccgtcgtcgatggcgacccaattgtcgttgttgaagctcgcggcgccggaaacggccctcagctgctgcttcagataggtgatatcgagattgatcttgtccttgtcgacgccggtctcggtggcggcgacgagcttggccttgatctggctgacgaggtcgatcgattcgccgacggcggtataggccgtgtccatcgtcgcggccgccagccccagcgcgtcgcggatcgccgattgcgctctctggtcgcttttcagtgtcgagctgatcgcccaataggcgccgttgtcggaagcgcgctcgacccgaaggccggtcgatacctgcctttgggtctgcaccaggttattcccggtgtcgcgcaatacataaagcgcggcatccaccgcggtgcgccgataaatactcacggatactgaactccgaacacaacaatacgcaactggtacaaatgaaccggtgccgcgaacgctcatgtccgggagcgcccgaaaggggcactgctcggccttccggaacgctggaagaccatcggtatcgatagcaatgattacggcttatgcttaaaaaacagctaaaagtcgcaattaatttagcgtgttatgcaaccattcggaaaggatgccggagtgccgacgacgaccgcgccgaagcgcgatcgtcaagccatgttcatcgaaccgcgacggtcattccgcggcttccagctggttccgagcggcgacgattttcggccgctccgcatgttccatctcctgatgcaaccgcgcttcctcatgcgcatgcggcttggcgaagcgggcgatcagcagataggcgacgggcgtgatgaacagcgtcaccagcgtcgcgaagccgagaccgccgacgatcacccagccgagtgcgacgcgcgcctcggcacccgctccctgcgcgaacaccagcggcacgccgccgaggatggtggcgatcatcgtcatcatgacgggacgcaggcgcagcgcgcaggccttctcgatcgacgccctcaccccttcgccctgatcgcgcagctggttggcgaactcgacgatcaggatgccgttcttggccatgacgccgaccagcagcacgaggccgatctggctgtagatgttcaggctcgatccggtgatgacaagcgcgaagacagcgcaggcgagcccgagcggcaccgtcgacatgatgatgaccgacgagagcatgctctcgaactgcgccgccagcaccaggaagatgatgatgatggcgaagccgaaggtgagcgccatgccgttggcgttttcctcaagcgtcgccgcttccgcgagcggcatcagccgcgcgcccgatggcaacagcgggccggccagcgtcacggcttccttcaccgcgtcgccgagcgagacgccgtccttcaggcccgcggtgatcgccaccgacgccagctgctgctcgcgattgagctgcggcgccacggcgccctcttccagcgatgcgatgaccgacatcggcacgatcttgccgtcgcctgtcttcaggaacacgttctccagatcggtcggatcgtcgagcggccgcgtgttcgaggtcaggagcaccggataggcatcgcccttgacgaacacgtcgaccaccgagcggccttccagcagcgactggatggcggtggacaggccggtgatgttgatgccgagatccgacgcccgctcgcgatcgatcgagatcgatacctgcgcctgcgtcggctcgttggccaggcgcggcgtgtcgtatcggccggtcgcgtcgagcgcctgcaccagcttcagcgccgacgccgtcagcgactcgtagtcgctgccgatcagcgccatctgcaggccgttgccggcgccgcgaatacgcaggctgttcgactggaaggcgttgccgcgcagcgccggcaccttcagcgccgcgcgattgacatcggcgacgatctggctctgcgtgcgctcgcgctcgccccagggggccagtgtcagcaccatgaagccgctattggcctgtccgttctgtccggagatggaaaagacgttgcggatatcgccgctatcgaccagcggctgcagatactcctcgaccagctgcatcttgtcgcgcgtgtattcgaggctcgatccctgcggcgccgtcagccgcatcatgaccatcgcccgatcctcgttgggcgtcagctcgctcttcacgccgttgaaggcgaccacggcggcgccggcgaagatcaccgagaacacgatgaccatgagcggagcgttcaggcagcgctgcaggcaccactcataggcgctggagaaccggtcgccgaagcggccgagcatgccgtgatcctctttcatctccctggtcagcatccgtgacgccatcatcgggcagagcgtcagcgccaccagcgaggacagcccgaccgagaaggccagcacgaagccgaattcgcggaacaggccgccgacctggcccggcaggaacgacagcggaatgaacaccgccgccagcgtcgccgtcgtcgcaatgaccgcgaagaacacctcgcgcgtcccgagcacggcggccgcgcgcggccccatgccctgggcgcgccggcgcacgatgttttcgagcaccacgatcgcatcatcgaccaccagaccggtcgcgagcacgatcgccagcagcgtcaggatattgatcgagaagccgaccatgtagatcgccgccagcgtgccgatcagcgccaccggcatgctcaccgccggaatgatcgtcgcccgccagtcgcgcaggaacagatagatgacggcggtgacgatgacggcggccagcaccagcgccagcaccacttcctggatggcgccctggatgaacaccgcgtcgtcgctggtgatggcgatcttggtgccctcgggcagcgtcttggacagctgcgccaccgcggccttgataccattggagatattcagcgtattggattgcgcctggcggatgacgccgagaccgatgccgggaacgccgttcgagcgcagcgccgtctggccgtcgcgcggtccgagtgtcacggtcgccacatcgcccagccgcacgcggtcctgcagaatgacgttggcgaaatcctgcggcgtctgcagggtggcggtcgcgcgcaccacgatgtcctgcgtcgggctcttcagcgagccggccggaacgtcgagcgccgcgttcgacagtgcggtggtgagatcgccgatcgtcagcccgcggctggcaagctcgccctgatccacgtcgacgcggaacaccttttcctgatcgccgtagctttcgacgtcggcgacgccatcgaccgaagccagccggtcgatcacctcgttggtcacgagcagcgtcaggtcgtccatgttgagcttggtcgaggtcaccgcaagacgcatgaccggctgcgaatccgaatccgccttgacgatctgcggcgcatccgcgtcatcaggcagccgatcggtgatccgtccgatcgcgtcgcgcacgtcgttggcggcgaccgccagatcgaccgtatcggaaaactccagcgtcacgcggctctggccgaactgcgagctcgacgagatcgacttcagcccgctcacccgcgcggccgcaccctcgatgaccttggtcacctcctggtcgatcgtctgcggcgacgcgccgtcgaaggtcgtgcgcacggtcaccaccggccggtcgacgtcgggaagctcgcgcacctcgatgccgacataggccgccaggcccgcgacgatcatcaacgtgttgaacaccagcgccaggataggccggcgcacgaagagcgccgtgaaggtctgcttgcccgaaggcgcgttattgtggttgccgctctcgctcatcagctgacgggctccttggcggcaagctcgccaccttcggagcgcaccggcccaccctcgcgcacccgctgcaggccctgggtgacgatcaggtcgccatcggcgagattgcctttcaccagaacgtaatcaggattgcgctggacgatgctgacgcgcaccttggacgacttctgctcgaccacccgccacacgaaggagccttgcgaatcccactgcaccgactgcggatcgaccgccggatactgattgccctcgaaccgcatgccgacgctgaacgacatcccggcccgcagctcgtcggaagcattgttgatccgcgcccgcatcctgagcgttcggctggcacggtcgacgcggttgtcgatcgcctcgacggcgcccgaaaacacctgccccggccgcgcgaccgacgtcgcctcgaccgcctggccgaccttgaccgtattggcgaaacgctcgggcacccaataatcgacgaggatttccgtgcggtcgtcgagcgtcacgatcggcgtcgtcgtcgagacgttgtcgccgatattgatcggcatgatgccgacgatgccgtcgatcggcgccaggatgttgcgacggtcgagactgagctgcgcggcctgcaattgcagccgcgcgttctgctcggcgatctcctggtcgaacacgtccatgcgcgagacgctggacttgatattgttatagaggctggacttctcgaccgccgctttcagcgccacgtcggcctgtcccttggcgatcacctgctcttcgctgtcgagcttggcgatgacctgcccctgcttgacgcggtcgcccgacttgacgaggatttcgcggatgaggccgctcgcctgcggcgtcaccaccaccgagcggatcgcgtcgccggtgccgatcgcgctcagccggtcgttgacggtcccgggcacgacggcctgcgtgacgacaagcacagcggcgttgcgtccacccccactgccgccgccgccattgccgccggagcgacggttgccggcctgctcgccggatgcggcgggcgccgcccggtcggcattgtcagtatcgatcgccttgccgacaagcgcttcgggaacgccggcattgcgcagcgtgtcgcgcgcgccgggcacaaagaaagcccatgcgctaacgccggcggcgataacgatgagacagatggtaaactgcttccaaaatgacattcacgtctccagagggactcgaggctagtccagggtcgatcgaaagaggcgcgtacgaagctaacgccgcgtaacggcgcgaattatcgtctgtttgccggtcagcggcaagagaattgccgccccattacagcattgtaatgtcaactgtcggtgaccggagaaggcctgtcgtcgcacgttgatttcgcccgcccggcaagcagacgcggcggacaacgcgccggccgccgcacgcgccagacaccatgccaaggaccccgccggagacaatgtcggccgaaccgggaaatagtgctttcgtttcgcgccattccgatgttctcttcggtgccatgggccgaggatgcgcccgcgctccattcattcaaccgcaaagaggatgacgagcatgccgaagatcgccaccagggacggaacgaagattttctacaaggattggggcaccggccagccgatcctcttctcgcatggctggcctctttcgggagacgcctgggaagcgcagatgctgttcttcggccagaacggctaccgcgtcatcgcccatgaccgccgcggccacggcaagtcctcccagagctgggacggcaacaacatggaccagtacgccgacgatctcgccgaactgatcgagcatctcgacctcaagaacctgatcatgatcggccactccaccggcggcggcgaagtcgcccattatctcggccgccacggcaccaagcgcgtcgccaaggtggtgctggtcggcgccgttccgccgctgatgctgaagacatcggacaatcccgaaggcctgccccgcgacgtcttcgacggcatccgcaagggcacggcactcgaccgctcgcagttcttccgcgatctctccatgcccttctacggcttcaaccgcgacggcgccaagctcaacgaaggcctgcgcgagaccttctggctgatgggcatggcgggcggcatcaagggcgaatacgactgcatccatgaattctccgaggtcgactacaccgacgacctgcgcaagatcgacaagccgacattgttcatccacggcgacgacgaccagatcgtccccatcgccgccgccgcgctcaaggccgcgaagatcgtccagggctcggtgctcacggtctacgaaggcagcgcccacggcctcgcccagctcgaaccggaacgcttcaacgccgatgtgctggcgttcatcaaggggtgatgggcgcgccgcgcggtcggctgttggacgcttgaggctcatccgcaccgttgaattcgcggagacgtgctcggatcctcggcacaaggccgagcatctgccaagcccgcgttttgctcgacgcggatggacactggccgccaacgagcaccacccgctccccaccacaacactgcaacatcccgtggaccgggaatgaaagcagaacatcttttctggtctttccgatccgaatcactacattacgcgccatgagcaacagtttcgacgatatgcccttcttcgacgaggagccgggcgaagcgccgcgcaagcagcaggcccccgcggctcccgcacgaggagcccccgtttcggctccggcatcgggaggtctcgccgcccgcgccatggccgcccgtggcggcgcccagcggccggattatctcgatggcctcaatcccgagcagaccgaagccgtcgagacgctggagggcccggtcctcgtgctcgccggcgccggcaccggcaagacgcgcgtgctgacgacccgcatcgcccatatattgaacaccaaccgcgccttcccctcgcagatcctggcggtgaccttcaccaacaaggccgcccgcgagatgaaggagcgtatcgcccatctggtcggcggcgcggtcgagggcatgccgtggctcggcaccttccactcgatcggcgtcaagctgctgcgccgccacgccgagctcgtcaacctgcgctccgatttcaccattctcgacaccgacgacgtcgtgcgcctcgtcaagcagctgatccaggccgaaggcctcgacgacaagcgctggccggccaagcagttcgccggcatgatcgacacctggaagaacaagggcctcggccccgccgacatccccgagggcgacgcccgcgccttcgccaacggcaagggtcgcgaactctacttcgcctaccaacagcgcctctcgacgctgaacgcctgcgatttcggcgacctcctgatgcatccgatcgcgatcttcaggaagacgcccgatctgctcaaggaataccaccagcgcttccgctatatcctcgtcgacgagtatcaggacaccaacaccgcgcaatatatgtggctgcgcctgctcgcccagcgccccaagggcgagccgcagaacgtctgctgcgtcggcgacgacgaccagtcgatctatggctggcgcggcgcagaggtcgacaacatcctgcgcttcgagaaggatttccccggcgccaaggtgatcaagctcgagcgcaactaccgctccaccgcccatatcctcggtgccgccgcgcacctgatcacccacaatgaaggccgcctcggcaagacgctcttcaccgaccgccgcgatcccgatgatatcaaggtgcaggtccacgcctcctgggattcggaggaggaagcccgcgccatcggcgacgagatcgagcagctgcagcgcaatcagcataagctgaacgacatggccatcctcgtgcgcgcctccttccagatgcgcgagttcgaagaccgcttcgtgacactcggcctcaactaccgcgtcatcggcggcccgcgcttctacgagcgcctcgaaatccgcgatgccatggcctatttccgcctcgtcgcccagccggccgacgacctcgccttcgagcgcatcatcaacacgcccaagcgcggcctcggcgacaccaccgtgcgcgcgctgcacgattatgcccgcgcccgcgacatcccgatgctggcggcagcggccgacatgatcgagaccgacgagctgaaaccgaaggcccgcaaggcgctgttcgacgtgattcaatctttccgcagatggcaggaaaggcttgaaaacacgtcacataccgagctcgccgagcagatcctcgaggagtccggctacaccgacatgtggaaggctgacaagaccgccgacgcccccgcccgcctcgacaacctgaaggaactcatccgctcgatggagagcttcgagtccatgcgagggttcctcgagcacgtctcgctggtcatggacgccgagcagaacgagaacctcgacgccgtctcgatcatgacgctgcactcggccaaggggctggaattcgagaccgtcttcctgcccggctgggaggaaggcctcttcccgcaccagcgctcgctcgacgagaccggccgcgccgggctcgaggaagaacgccgcctcgcctatgtgggcttgacccgcgccaagcgccgctgccacatctggttcgtctccaaccgccgcatccacggcctgtggcaatcgaccatcccctcgcgcttcctcgacgaactgcccgacacccatgtcgaggtcgccgaggtcgagcagagctacggcggttacggccgcggcggctacggccagtcgcgcttcgacaaggccgagcccttcgccaacagctattccacccccggctggaagcgcgcccagcaaaaccgcaacgacgccacccgcgacaactggggctcccgctccggccattcggtcgagcgcatcggctatggcgaaagcggcccgaagacccgcaccatcgacggcgaactcgtcgccaagtcgacagcgacccagccctcgaaattcaccgtcggcgaccgcgtcttccacatgaagttcggcaacggcaacatcaagatgatcgagggcaacaagctgacgatcgaattcgacaaggccggcgaaaagcgggtgctggatggctttgtcgaggcggtcggctgacgaaacgcggcggcggcgatccgccgtcacccattcgtgacttcgcatatgagcccgcttcccgcatactccccacgcccgcaccatgaaccgcgggcccaaataggaggatgccatgaaacgctactcgctatccctgatcgcaatgtcccttgtactggccgtcgtcggcaatccggcgatcgcgctcgcttgcaacaagatcgtcgggacgtgatcggctgaaggaatgggtgagcgggtgaaagcccgctcacccattgccacttaaccgccgtttccgatgtatgattggatcacagactgaatttgtgtcttcgctttgaagatgtcggtcacctgcacgatatcaaatctcgcgcctgccttgtcggaatcgaaaatcgtcagaaattttgtcttcgagttgaagtgaagcctaacaatcggctttcgattgttgtcatcgaagttgatgccgcaatacgatttctgatctcgcatcaccacgcgggaaatatcagctacctccgcggcgatcgcgcgaacgatgttgaagccatcgacttcctcctgcgtcgtctcgatcccatcgccgtcctccgtcagttgcgtcacagaatcgacgtctttgatcgtcggaatattgacgttgtcgttgaatgccgccgtgagctttttctgtatcttctgcctgaccagatcctcaaacgcgcgcttgatgatcggcttaaattcgctcaccacggcagaggtcagcttgccgtcataaagtccctttgagatcattcggacaaattcgtcatcgggatcgttgaactgcgcttctatactgctgatcgcagccttcatccgtttcagcgtgttggccgaactcttgatgtcggtaatcgagaagcgatccctgtggaatttctccaattccttgagatcgttgtcgtcatagtcgaagagatcgaacttgaagaacggattggtgtccaacttgtttggtgcatcgaggtcggtgaagaaccagatttggataccgttggtcaggatggcgatcgagcagtcagtcgttgagaaatatcgatagagttggctgtactgagcttgtgacagattggcgcttacggccttcgcctccagtatatattcgatgcgatcattgatcctaaccgcataatcaactttctcaccctttttgagaccgacatccgcggtgaactccgggacaatctgtgagggatcgaaaacatcgaaacctagagttcgaagaaatggcatgactagcgcgttcttcgtagcctcttctgttaaggcaatagtctgcgcggaaacggcacgcttagaaagttctgtaacctgttctttgaaagacattgattgatccccagaatcgtcagaaatcaattattaaatgcacgagaaaaaagtgcaatccacgggagaattgacgcccctcaccccagtatcggcatcgaccccagccccaatatatcgttgagcagcgccagcccgatgccggccgccacgatcaccaatccgatcaaaaacagccgccgcgagcggtcgtatttcgccgcgatcagcgagtccctagcaagcaggtcggcgaagaccttcacctgcaggccgatgccgacgacgaggagcagcatcggcaggatgtcgatccggctccagtcgttcgggttggagacccagcggctgatgaaggtgagacagaagcccaggatgatgcccgcggcggtcagcgagccgttgcggaaggtggcgtcgatcttttcctctggctccggctcgggcatggctatggctttcggctgatcttctcccgaaagaaacgcagaaatccccgaagacggcaagagcggccaagatcgccaagccgacatcgccacgtcggcgaatcggtcatacatagcgtaaacacaatcttaatccgtgccgccgacagcggtcaatcgggtgaaattcatcacaacattcgccttttgacggcggccgcaaatcaccttagcccgtctgcagccgcccgagaaggacggcgggttcgcaagggagattcaggtgaccagcgtatcgtctttgggcggcagcgccccgtatatttccggcctcgacaagaacggcgatggcatcgtttcggccgaggaactgtccgccgccaacaccacgaacaattcaggcgcgacggcgaccaaggcatcgacggcaaacagcaccgccgacagcgccagcatcacccagaagatcgccgccgatattctctcgctgatgctgcaactgcagcagtcgagcgaggcgagcgacacctccggcaacgatggcgccgtgagcggcaacagcccgaagggcatcctcgccctgatggatagcaacgcggatcgcagaccgaccgcgagcgagctatttgccgatccgtcggccgttgaacggcccggcagctatcctgctgacgctccggtcctcgccgacctgcagactgtcattctcgcctatcagaacacctagggctccgcgcctgccgctggcggcagcgtgcaaaacggctgaccggctggcgatttggcgccgccggcaaagcccaaacggcctcgatcgaacgcaagctccggctcgccggcgtcaaggttgaacgtgccgggttcttccgcctggcgaagaaccgcaagctctccgaagaactgatgagaaagctggtgcgcgaggcgcatctagccgaagcgcgtttcgcgatcccgtaaggccaacgcgaggcggtaaatgacctcggccttgaagagatcgccggtcgtttcggcgaacacgttgtcgtgagcgtcaccggcgcttcccgcgaaggctgtttcccgcctccttgataatccccgcctatcggcagccgttcattctccgggaaggcggagtttccggccattccggagggttccgcgctaacccgctggcatccttgaggctggcttgttgcctcgatacggcttcgtttcccatcggcgcgggccttggagctttcaggttggagtaagggttctgtggctacgtcgcccgccgggtgcattggggaaggtagacttattatcattacttataggagcggatatgacagataaccgtcttgtccttcataccaatttgcgtgaccaggtgttcgccgacgaacacgatgcggtcgcggacttttccttcaactcgaccgtggcaagtgtgttcgacgacatggtcagccgatccgtcccgttttacggagagatgcagcgcatggtttgcgagctggcgcgggacttcgcccagccgcagtcgaagctctacgacatcggttgctcgacggccacgacactcctgacccttgatcacattgtcgacaatcatgtcgatttcgtcggtatcgacaatgcgccggagatgctcaagaaggccgcggagaaaatcgaggaatccggcacgaaccgttcgatcgacctcgtcaccgccgaccttcaccgcggcttcaccatcgacaacgccagtgtcgtgacgatgctgctgacgcttcagttcgtccgcccgctctttcgcgaacgcgtgatgaagacgatctacgacgggctcaacgacgacggctgcctgctgctgatcgagaagctgaccagcgaggacacgacgttcaaccgcctcttcatcgaccactattatgaattcaagcggcgcaacggctactcgtccatcgagatatcgaaaaagcgcgaagcgctggaaaatgtcctcattccctaccgcctcgaggaaaacatccagctgctgcgcgaagcgggtttcaagagcacggaggtgttcttccgctggtataatttctgcggcattgtcgcgatcaagtgagactgaatgacatgaagaatctgatgctgaaggtggggaccttctttttcaagtatcgaaaccaggctttcccgctgatcatcgtcgccctgttcgtcgccgcgccaccgacggtgtcgatattcgggagtacggaactcgagcggtggaaggacgtcgtggcgctggtcgtcatagtgtcgggcctcgtccttcgcgcgaccgtcatcggctatgcctacatcaagcgcggcggtctgaacaaacgcgtctatgccaaggaccttgtcacggaaggcatgttcggggtctgccgcaatcccctctacgtcggcaacatgctcgtctactcgggacttttcctgttccacggaaatccgctggtcgtcgtcgtcgggtgcctggtgttcgccttcatctaccagtcgatcatctacgccgaagaggaattcctcgccgacaagttcggccagggctaccgcgactattgccggaatgtcccgaggtggggcctcaagctcagcgcgttcgcttcctcgacggagggaatggcgttcaactggaaaagggtgatcgccaaggactattcgacgatgtcgtcgacgctgatcgcggtcgtggcaacggagttctacaggcttgccgccgactcgatcaccgagcaggagatctcctacgcggttgtgctaggggcgattctcgttgccgttcttgccttcacgggactgaccagctcgctgaagaagctcggcgtgttcgatgacatgacaacggcgcactgagggccggcgacgacgccaagcgggcgcgccgcagcttgcctctggcaaggtttcgccgcgcccctctgcgctcccggacatctcccccttgtgggcgcgggtcgagacacgtggctcggccccataccaccacccgaccccacgggcacgatcacccaccccacgaaacaaatccgccaacccgctcaacaccctatcaccagcgccacacatttctcatccccgcccctcgccgccacgccatactcccctcgtcaccgcactgggagccgggtcgcgaaccggatgctcagccgctcgaaatccggcgtgtggtgatggttgccaaggggatcgaacgccgtcagggccgatgatccaccggcaagaccgatccgagagacgctcctgtcgggtcgggcgaaccggaaaccgaggtgatcgggcaggcggacagcctgacatccataccaccgacaacaacccgcctgcccttcccgtttcatgacgccgaccgtcgcgaggctttgcttcgcgcgcggttttggcgtgcctggtgggtgggatgatggttggcgttctgccatttaacgccctctctggcctgccggccatctcccccacaaggggggagaaaactcgtggttagcgctcgcccagacagcaaatgtggagcgagcggccgcccccagcgttctccccccttgtgggggagatgccggcaggcagagagggtcttccacccacacccaccccaaaaaacaccctctccccacccatcatctcgcaagcgcgaaacattttaccgcaaagcacaacaaaatactttgaatcctatcgaaatctccgaattgagcatatatgagacattgcggcttgctgcacgcttccccccaagcgccccgccgagccgccgccggcccgttttgacaacggctttcaaaggaaaatacccggcgtccacaacaggagattcataccgtggccagtatcacaactagcaatgccgcgacgacgtcgtcgtcgtccccggcagccaattataaattcgcgcttatcgccctgacatcgctgttcttcatgtggggtttcatcacctgcctgaacgacatcctcgtcccgcatctgaagaacgtcttccagctgaactacacgcaatcgatgctcattcagctgtgcttcttcggtgcctatttcatcgcctccctgccctcaggcgcgatcgtcaggcgcatcggctacaagtggggcatcgtgctcggcctggtcgtcgccgccatcggctgcgcgctcttcgttccggccgccagctaccgcgtctacggcctgttcctgggcgcgctcttcgtgctcgcgagcggcgtcacgctgcttcaggtcgccgccaacccctatgtcaccgtgctaggcccgccggataccgccgccagccgcctgaccatgacccaggccttcaacgcgctcggcacgacgctcgccccgatgttcggcgcccttctgatcctgtcggcgacgacggcggctgtcgccggcgccacaccggagcagctcgatgcgatcaagatcgccgaagccggtgccgtgaagttcccctacatgctgcttgcagccgcctttctggtgctcgccgccgtcttcgcggccctcaagctgccgcaggtcgagggcgatgaggagatcgagccgatcgtcggcggtggctcggcctggcagttccgccacctcgtcctcggcgcggtcggcatcttcgtctatgtcggcgccgaggtcagcatcggcagcttcctcgtcaacttcatgagccagcccgagatcgccggcttctccgaggccgacgccgcccattacgtctcctatttctggggcggcgccatggtcggccgcttcatcggcgccgtcgccatgcgctatgtcgacgacggcaaggcgctggccttcaacgcggcggccgtcatcgtcctgttgctcgtcaccgtgtttaccaccggtcacgtcgccatgtggtcgatcctcgccatcggcctgttcaactcgatcatgttcccgacgatcttctcgctcggtctctacggcctcggcaagttcaccagccagggctccggcatcctgtgcctggccatcgtcggcggcgccattcttcccgtcatccagggcgttctcgccgatacgatcggcatccatctcgccttcctgatgccgatcatatgttacgcatatatcgtcttctacggcctgaagggtcatcgcccgatggcgcatcagatcgcccgtcacgcctgaccgataaaatcgcaccccgccttgacggcggggtgcttccacccttgcgtcggccgatccggcttggcatgttgccgtgcaacaataggtggagaaactgccgatgaaggccttgttactgatcgacatccagaacgggttctgccccggcggcaaccttgccgttcccgatggcgacaaggtggtgccggtcgccaaccggctgatcgcgagcggccggtatgatctgatcgtcgcctcgcaggactggcatccggaaggccacggcagcttcgcttccgcccatcccggcaaacagcccttcgaactgcacgaactgtcaggcaagccgcagatgatgtggccggaccattgcgtccagggcacgagggacgccgagctgcatcccgaactcagggtgcccgagatcgacgtgatcttccagaagggcgagaaacatcacgtcgacagctactccgccttccgcgacaacgatcagcacgccatcaccggccttgccgattacctcagggaacagggcgtcaccgaactcgacctatgcgggttggcgaccgactactgcgtcaagttctcggcgctcgatgcgctcgaaatgctccccggcgtcaagctgcgcttcatcgaggacgccagccgcggcatcacgccggaaggcgtggccgccgcgatcagggagatgcgcgacagcggcatcgacatcgtcaccagcgagcagctgatcggcgactagagcaattccagcaaaagtgtagcgcggttttgcgtccggaattgcgtaataacaaatagatagagcatttttgcgtttcgaggaaacgcggaaaggctctaatcgcctgcatcgcgctgcagctgatagacgtcgtcggaaaagtcgtcgatgcgccgcgccagcgccgcctgcgcgtcgtcgatgccttgccggtaataggcggcccccacctccttggcgaagaaatcaagcaccagctcggccttcagaaggccgatcggctggtcgagctcgcggtcgaaatggtgctggatgcggccaatcagcgccgccttctcgtccttggaaaattcgatcggcttcatcgtcccctcattggcttcacatcgacacgtcgcggctaccccgcaccgttcagcgaaatcgatcgatcaatcaaggaaattcgcttgcagccgcagccgcctccccttagagcggttccaaattccaggaggatgatcgccgatgtcacgcgcgagttttaccgacggcctgcgcggcggcttccccatcgcgctggcgtccgccccgtttggcgcgctgttcggcgccctggccgccgacaagggcatgtcgctgttcgagcttaccttcatgagcgcgacggtctatgccggcgccagccagatggttggcctcgagctttttggcaacgacgtccaggcctggctgatcgtcgcctccatcctcgccgtcaacttccgccacgtgctctattcggcggcgatcgcgccctacatcaagcatttcaccaagctgcagaagttcttcaccttcttcctgctagtcgatccgcaattcgccgaaacggtcaagcgcggcgaggccggcaagtcggtgaccttcgcctggtatctcggcttcggcctcatcatctatattccctggacgatcgtcagcctgatcggcggcacgctcggccgctatatcggcgatccgaagtcgatcggcctcgatatcctgctgccggcctatttcctcggcatcgtgctggatttccgccaccgcaacaacttcctccccgttgccgcggtcagcgccgtcgcatcggtcgtcgcctatcgctatgtcggctcgccctggcatgtgagcctcggtgccgccgccggtatcctgcttgccgccctgttcccgccgccgccgaccgcgcaggaactcgaatccgatctgcacgaggtgtgacgtgaccatcgattcccacatgctgctggtcatcctggcggccgccgtcgccacctatgcgacgcgcatcggcggctatatcctgatcaccacgatgaagcgcatcccgccgcgcatggaagcagcccttgccgccgtgccggcagcggtcttgaccacgctcgtcgcccccgccttcttcaccggcggctgggataccaagctggcgctggtcgtcgcccttgtggtcggcctgcgcgtctcgcatacatggatgctggtcgccgcctgggcggttgtcatggcctggcgccacacgatcgccggctgacgcggcggccgatcagacggccgccggccttagcagttcgatagtctcaatattccaacggcagcgtcgcattctccagccacgccttgacctcgtgatcatggatcagcggcatcagcgcttcacgcgtcttcacgtgatagtcgttgaaccagtgcagttcgtcatgggtcagaagctcggcaatgacgaggctgcggtcgatcgggcagaaggtcagcgtctcgaagctcagcaccggcatgtcgccgccctcgacgggctcggcatcgcgcacgtagatcaggttctcgatgcggatcccgaacgcgcccggccggtagtagcccggctcgttggaaaggatcattcccggcagaagctcctgcgtcgacatcctggagatccgctgcggtccctcgtgaaccgagagatacgagccgacgccgtgacccgtgccatggccgaaatcagcccctgcccgccacagcgcgatgcgcgccaacggatcgagatcgcagccgcgcgttcccttcgggaaccgcgccgtgctgatctggatcatccccttcaagaccagcgtgaagaaccgcttctgctcttccgagaccgtcccgacgcccaccgtgcgggtaatgtcggtggtgccgttgatgtattgcgcgccggaatcgatcaggaaaagttcacccgcctcgagcttgcgattgctctcggtcgtcacccggtaatgcatgatcgccgcgtgcggtcccgcaccggagatcgtgtcgaaggaaatgtccttcagcgggttctgcatgctctgcccgaccttggcgcgcgccgcctcgagcttctcggcgacctcgatctcggtcaccgtgccgggctttgtccgcgccagccagcacaggaactcgaccatcgccgcgccatcctgcagatgcgccgccgccgagccgttgatctcgacgctgttcttcaccgcacgcggcagcttcgccggatcgttgccctcgaccacgacaccaccggccgcgcggatgatgctggcgagcccgtgagacgtgagatcggggtcgacgagcacccggccgccgtccctggagaccgccgaaagcttttcctctagcgccgatggcggcagctgcgcgcacatctgcgccagataggcctcctgctcgatcccggtcttgcgcttgtcgagaaacaggtcggccttgccgtccgcatggatgatggcgcgcgccagcggatgcggcgtgtgcggcacgtcggcgccgcgaatgttgaagatccaggcgaccgacgacggatcggcgatcagaaccgccttgatgtccttggcggcgagatcggccgcgatcttggcgatcttctcatcggcgaggacacccgcctgcgccacgttctggatcgcaacggcccccagcggctcctgcggccggtcggcccagagccggtcgagcggattgtggggaaggatgaccagcgaaccgccgatcgcgtccagcgccttctcgagccgcttgacctcggcgcccgaatgcagccacggatcgatcccgagccgcacgcccttggcgccgtgattgccgagccacagatgcggcggctcgttgacgagatcgccgcccgtaaacaccgaaccgtccacctgctcggcgagctgcgtcacatagcggccgtcgacgaacacgatcgcctgcgtgcgcgtcaccagcgccatgccggccgagccggtaaagcccgtcagccacgccagtcgctcggaacaggccggcacatattcgccgttgaactcgtccgccctggggacaagaaaggcgtcaatatcgagatcgtcgaaacttgcacgcagcgcggaggtgcgatcgcggccgaattgtggcgtggaggtgacttcgaaagactggtacatgctcaaaaacctgatgtttggtccgccattcaatacgaatccggcaagcggaatgccgttatgttatcggaatttcacgcgaacgggagaaaaaccgcgtctcgccgatgatcgaaagccgcgtaatatttgggcggaaatgaggcgcaattcaccggattggcacgctttatgcattggctgcatggctcccatgaaacaaaccgtctgcctcaattttttcaatcggttataaggcgcccatcgaatggttcgaagcgaaccgcaaacaaaaggatttttgaaatgactgcctctctgtcgcgctccgcttacagcagcccgttgcaggctggcgagcgccagaccgtccgtcatgtcatcggcgctcgtcgcccgctgaacgaaggcccgcgcaccattctgggcgccgccgcaagaagctacgcattctgagcaacgcgccgctccgctctcctcctccctcaccggaacggcgatcagaataagtagacgtctgctcgagcactcctcctcatcaagctcgcggacatgatcgggaaaccggtcgcaaggcggtgccattggcgccgccttttctttttgtcgcgatgcaacgcgattgaaatgcgaaagccccgaagccatcaggcgctcggggctttttttcatgagaacgggatctggcctcagggccgatcgagatggatcgtcacccagccattgcgccagatcgtgcgcacatgcctcagatgcgcgccattataggccgccagaaccttccagcgctgcgccgccaggatgccggaaaggatcaccgacccgcccggcgccagatgcgtgacgagctgcggcgccatcttgatcagcggccgcgccaggatgttggcgatgatgaggtcgaacggaccatggttcgaaaacgccgtcgaatgaaaccccggcgccgtctccgtgacgatacccgacgcgatgccgttgcggcgcacgttctcggccgcgacacgggtggcgatcggatcgatgtcggtggccagaaccggaatgttcttcagcttgcgcaccgcgatcgccagcacgccgcttcccgtgccgagatcgagcgcgttgcggacccggcgcgagcgaacgacgcggtcgatgacctcgaggcaacccgccgtcgtgccatggtgaccggtcccgaaggcctgcccggcatcgatctcgatggcgatatcgccggagcgcaccttgtcgcggtcgtgcgatccatgcaccaggaagcgccctgcccgcacgggcttcagcccctcgagcgacttcgccacccagtcgacatcgggaatgacctcgcgctcgacagccatatccggaaacgcttcggaaagcgccgcctcgacccggacgcggacgtcatcctcgtcggccagcatcatgtagacggaggcttcccatatgtccttcttctcgtcgatttcggtggtggcgatggcgaagtcttcttcgccgaacacctcggacaaaaggtcgagcacttccccggccagcacttctgtcgtcgtcacatagaggcggatttcactcaaggtcggtctttcccgttacaacgcgccgtcgatccacggcggcggcggcgtgtcgtatcccgcaacgccgttcagcaatcttcgttggaatgcaggtagtctaaaaagcaccggcaccgcaaggttccggatcgaaatagccagtcgattgcgcatcgcgatcagcatcgtcagctgccgtgtctgcttcagcaccgtcttgaccgccggcagccgcagccggctgtactcggcctcacgcccctcggaaatcagataggcgagccagcaggcatcctcgatccccagattcatgccgcgcgcgccggccggcgaatggatatgcgccgcatcgccggcgagaaatacgttgcccctgaccatctcctcgacatgccggaaatggatgcgaaactccgaggcccagagacgctccgccaccggcccgggatggacgatcctcgtctcgaaatccggcagcgtcgaaatgaaccgcagcacatcgcgctcgaccggaatccggccgatcatgccgggatcgaccagttgcatctcgatgaaatgcggatcgatttccttcttgtagcgaaagtcggcgagatagaagctgctctccagcgcctcgcccggaaagccgatgccgacagcctcgcggaccatggaatgcgcgccgtccgcaccgatgaggatatcgaacgtggcggtctcgaccgtaccgtcaggcttgcgcagcgtgacgacgggcttgagatcaccggataccttctcgatcgcggtctgccattcgggatcgacctcgtaatcgtcgagcttgctgagcagcagtcgttcggtgtgcccctgcgccagcgcataaatggcgctgaaccgacccggcaccttggtcgtgtcgaccgtcgccagccggcgcccctcggacgtcgcgcgaaactgcgcgatctgctgtgcctcctgcaggatggcatccgtcacccgcgacggaccgagcagcgtcagcgtccgcgcgttgacgccgagcgcccggctttcggcaagcggaacgggaccgacgtcgttatcgacgacgcgtggccgaaagccgcgtctggcgagttcgagggctacggtgagaccggtggtgccggcgcctgcaatcagaatgctgcgatgccccggcgccatgacgtcatccctttttggcgaggttctccagcttttttaccgccgtatcggaattttcgccataggcgatcgtgccggcgaagcggccggtggaatcgagcaggaacaccgacgccgtgtgatccatcgtgtagtcgccgttcggattgttttcgtcgacgggcaccttcttggcgtagacgcggtaccccttgaccatctcggccaccttgtcgggcgcgcccgaaatgccgacgatccgcttggagacattcgacacgtactggttcatcacctcgggcgtatcgcgctccggatcgacgctgacgaaataggcctgcagcttgtcgccgttgggatcgaccttgctcatccagccatcgagttcgtaaagggtcgtcgggcagacctcggggcagctggtgaagccgaagaatatggcggacggcttgccgcgaaacgcctgttcggtgatcggctttccatcctgcgccacaagcgtgaacggcacgccgaacggtccgtcgggggcggcctcgttggtcttcgtcacgttcaatgtaagccatcccagaatgccggccatcaggaacacggcaacccagaccgcgatacgcactgttttcatcgatagaatcctcgccccgaaaatgatcccttttttcgcctgatatcgcgtcgcatccaaccgcgcaattcaacaaccgctgttcgagccgtgatgaattgcctcacccctgccgcgcaaagacgtcaatcggcgaaacgtcggccaatattgcggcgatctcgcgccatgttaaatcaatcgtaacctctccacgcgaacaatcgaaacaactgaacgagatcgatacagcgacgactcgcccggacttttgggcgcagggcgcggcgggatcgacacgacgagacgttcaagatcggcgagggcatgaatgcccgtcacacgccgcgggaagcatcagcagcctcgcatccgacatcattttccgcatgcggcttcaccgccacgtcgcgggcgcattcagcggcggcagcgtcgcacgagccatggccgctccggccggagacaactgggaagaattttgatcatgaatagcactgtcatcaatcaggccggttctcatctggagatcgtgtccttccatctcggcgagcaggaattctgcatcgacatcatggcgatccgcgaaatccgcggctgggcgccggtgacgccgatgccacacacaccgccctacgttctcggcctgatcaacctgcgcggcgccgtcatccccgtcatcgacatggcctgccgcctcggcatgaagatgaccgagccttccgagcgctccgccatcatcgtcaccgacatcgccggcaagctggtcggccttctggtcgagcaggtttccgacatgatgaccatcaagagcgaagacctgcagccggcaccggagatcattccggaagagcagcgcgccttctgccgcggcatcgtggccctggaaaagaccatggtctgcttcctcaacctcgacaccgtcatcgccgacgaactggcccgcgaagccgcctgagccagatcaaacgcttcaatgcaaaacagcccgcgacggcatccgtcgcgggctgttttcatttgaagcaagcaatgccgctcgcaaaacctaacccgtgacctcgacggaaaacgcgaagcgcgccgtcttgcccgccgcgagcgtccggctgtagggacgctctgcaagttccttcgagccgccattctcggccgccatgccatgccagggctcgatgcagatgaagggagcgccgggcttctgccagagcgccagattgggcaggttgtcgaaggtgaagtgcagggtcggtccaccctcggcacgatagcgcagcccctcgcccgccccctccggaaagatcatcgcgtcctcatcgaacatcgcatgatcgagcaccagccgcccgcccttgaacggcgacggatgcctttcaaacgacagcagcccgccggacaggcggatgagcgcgggctcggcttcgttatcgagcgtgatcacatgatcgctcccctcgccccccggcagcggccacacgaaagccgggtggaagccgagcccgaaaggcatcggccgccggtcgcgattggtcacctcggcggccaccgtcaaagtccggccctcgatacggtgctccacttcaagcacgaaatcgaacggataggccgccttcgtcgcctcggacgccgaaagttcgtagcggcacatcgtatcgctggacgcggcaagcgcgaactcggagcgccgggcaaagccatgctggttcatcggatagctattgccctcgatctcgaccttgtcgtcgggcgccttgccgacgatcggaaacaggatcggcgaccgcccgccccagaaggccgcgtcgccattccacaacagcgaacggccgtcgcctgtacgaagcgcctgcatctcggcacccagcgacgatacgtcgacgctcagaaattcgtttgctatccgcgtgctgctcgccatcctcggtcctcttgcatttgatctccggcgcggaccttacccgcgccgtcgggcgattgccatatggcgattaaagacgaatgcggcatcgccgaaagtcgcgcgcggagcccgccttactgcggcttgccattcttccagctcaccgtctgcccgtagagcgacacggtggagatcgccatcttcgccgatccgttggtgagttcgcgcgaatgcgccagatagatcagcgtgtcgttctgcttgtcgtagatgcgggtgacgacgagcttcttccagaccagcgagaggcccgacttgaacacctcgtcaccgcccttcgagaggtcgatatcaccgatctcgatcggccccgtctgcaggcaggaaatcgcgctgttggaggggtcctcgaaccagttgccgttcttgacgcgatcaatcacgctgcggtcgaaatagctcacatggcaggtgacgcccttcacctcgggatcggccaccgcatcgacgaggatatcgttgccgatccagtcgacacccaccttgccgacggtctccgccgacgcagtgccggcgcagacgcctgcgagaacggctgcggagaacacgagattgcgatatctggacatggcggtaatccccctgcggcgtttcgatgtagcgcgagctaagataggcggggcttgccgcaaggcaagaaacccctgcccgtgaattgacctatgaagcggagcgccacatgccggcgcaccatcaagcaggacgcccgcgctgctagcccttgcggcaggtgcagggctcgtagccgcgcgatgtcagccgtcccggtttcatgccgataaactgagggatcgcatgcacggctgtcgcccccacatgccgcgccatggcgatcgccgcctgcgcgcacacggcggcatcctcggcggcattgtggtgcgcgaagcgcagcccgaggtgctcggccaggatattcagccggtgtgagaggaaatgcggccagatccgctgcgacatcttcaggctgcagagataggtgagctccggataggcctgccggtatccatccaggcaggcgcgccagacgctgaagtcgaaggaagcattgtgcgcaatcatcgtcgcgccacggaagtcgtcgacgaactcgtccatcacttcagggaattccggcgcgtcctcgacatgctcgggccggatgccgtggatggcgatgttcatgcccgaaaaccgcatctcccgaggacggatcaaccgctcctccacccgcgtcaccacgccatcctcgatccaggcaagcccgaccgaacaggcgctgccgcgctgctcgttggcggtttcgaaatcgatggcgatggtcttcaaggggatgtccgattctttggtctgtatcaggcatatcgacagccggtcgacgaggcaaatgacggcagctattcgcccacagcgccccgattaggcgacggcgagagcatacggacgagctaggttctccgatggcacaccccaagcctgattgagcttgaagatcatctcgacggtcagcgcgcgcttgcgattgaggatttccgacgcccgggaacgagagccgagaacttcggcgagatcagcctgatcgcgccccgtcatctccatgaaagcctgcagaaaatcgatcggcggaagatccagcactgggaaattccggttctcataggcttctataagatcggccaggatatcgaaacgatccgcgtccggcgttcctgccgcgggcgggctgtcgaaataaggtccgatctcagccgtcgcccaggcaagatccgcctcgtttctaatgggtctgatagcgctcatcgtatcgtctccggattgatcctgtcgtactcggcatgcgtgccgacgaatttcaccagcacccgcttgtgggcataggcgacatggacgaccagccgatacttgttgccaccgatgtcgaagatcaccctgttgtcgccaacaaagtcgacattcgctccgaacatcgtcttgatatcggacggccccgaccattgggccttgctgacggtcgcgtgccacacgcccaggggaattctcgcctgcgggtggcgctcccaaaagatacgaagcgtggacttggtgatcacctgcacatgaagaggatattcccaattcgggaacacgtcaacattcccattctcacccgctaatcaacgccagccactcgtcctcgtccatcgtctggacgccgagttctttcgccttgtcgagcttcgatccggcgccggggccggcgacgaggatgtcggtcttcttggacaccgagccggccaccttggcgccgaggctttcggcgcgcgccttggcttcgtcgcgggtgaatttctccaggctgccggtaaagacgacggtcttgccggcgacggggctgtcggaggccgcgatctgctcggcggcctgtggcgtcacctcccgcagcagacggtcgacgacatcgagattgcgcggttccttgtagaactcgacgatggcgcgggcgacgatctcgccgatgccctcgacattgttcaggtcctgccacgcgtcaccagccagtgacgaggcctctttcatcgcggtctcgaaagcctcgtaggtgccatagtggcgggcgagcagcttggcggtggtctcgccgacatgtcggattccaagcgcgtagatgaagcggttgagcgcgatcgagcgacgctcgtcgatggcgtcgaacagcttcctgacgctcaccttgccgaatccgtcgatattctcgagcttggtcagcgtcgacgcctcctgccgcttcttcagcgtgaagatatcgggcgccgtgcggatcttcagcgcctcgtcctcgctctcgaagaagaaatcgacctgcttggtgccaaaaccctcgatgtcgaaggcattgcgcgagacgaaatgcttgaggtgctcggtcgcctgcgcgcggcagacgaagccgcccgtgcagcgggtgacggaatcgagcttgccggtcttctcgttgcgctcgcgtacagcatgcgacccgcaaaccggacacgtcttcggaaacacataggcctccgcccccgccggccgcttctccatcaccacgtcgagcacctgcggaatgacgtcacccgcccgctgcacgatgacggtgtcgccgatgcggatatcgtgatcgtcctcgcggatgcgctcgccggaattgccgatgcccttgatgtaatcctcgttgtgcagcgtcgcattggtgacgacgacgccgccgacggtgacgggcgtcagccgcgccacgggtgtcagcgcgccggtgcggccgacctggatgtcgatgttctcgaccgtcgtgaacgcctgctcggccgggaacttgtgcgcggtcgcccagcgcgggctgcgcgagcggaagccgaggcgctgctgcaggtcgagccgatcgaccttgtagacgacgccgtcgatatcgtagtcgagatcggggcgctgcaagccgatctcgcggtagtggccgaggatatcctcgatattgcaaagccgcttcatcagcggattgacgggaaaaccccatttgccgaaggtttcgaccatgcccatctgcgtatccgagggcatttcggagatctccccccaggcataggcgaagaagcgcagcttgcggctctccgtcaccttggcgtcgagctggcgcagcgaccccgccgccgtgttgcgcgggttcacataggtctgcttgccctcggcctccatctgcgcgttgaggtcaaggaagtcgctcttggccatgtagacctcgccgcgcacctcgacgatatcgggcgcatccgcgggcagcgtcttcgggatctgcttgatcgtcctgacattggcggtgacgttctcgcccgtcgtgccgtcgccgcgggtcgcggcgctcaccagcttgcggttctcgtagcggatcgacatcgacaggccgtcgatcttcggctcggcggtgaacgcgatggagccgtcgggcaattgcccgaggaaacgatagaccgagccgatgaaatcctgcacgtcctcgtcggaaaacgtgttgtcgagcgacagcatcggccgcgaatgggtgatcggcgcgaaggtcggcagcggtgccgcgccgacacggcgcgacgggctgtcgtcgcggacgagttcgggaaagcgctgttcgatcgcatcgttgcgccgcttcaacgcgtcgtattcggcgtccgaaatcgccggctggtccttgccgtgatagagctcgtcattgccggcgatctcggccgccagaaaggcaagctcggcggcggcctgttcttcgctcagggtttcgacgggcgtttggttggcggcggacatggcagggactccctttgaggagtcgttttctagagcaattctcgccgaggaaaaagcgccgcattgcaattgtcagcagctgcttacagatcgtgccgatgatcgactggacggatcgtcacggccgccactccagccgctacgacgtcctatatccctgcatcagggtcgcggcaaatcggtgcttactcgcccgccgtcaacagccgtttggcggccgccctcgcctcttccgtcaccgaagcgccggccagcatgcgggcgatctcttcggtacggtcgtgcggctccatcgtcgccacgcgggtggcgatcttttcggatccctcggaagccggtcccttggagatcaggagatgcgtcgccgcccgtgccgccacctgcggcgcgtgggtgacggagagaacctgaaccttggccgacagccgcttcagccgctggccgatcgcatcggcgacagcgcccccgacgcccgtgtcgatttcgtcgaagaccagcgtcggcgccgagccgcgatcggcaagcgccaccttgagcgccagaagaaagcgcgagagctcgccgcccgacgccaccttcatgatcgagcccgggcgcgtgcccggattggtctggacgtggaattcgacgacgtcgatcccctcggccgcagcttcctcgggattggaggcgatctccaccatgaagcgggcgcgctcgagcttcagcgccggcagctccgccatcacggcttcggcgagcgcttcgcccgcctggtgacgcttggccgaaaccacctgcgccgccgcatcgtaagcgactttcgcgacgccgacctcggcctcgagcctggcaagcttctcctcgccggcatcgagatcggcaaggtcgttgctcatgcggatcgccagcgccggcagctcggtcaccggcaccgaatatttgcgcgaggcgccgcgcagcgcgaaaagccgctcctcgacgcgctccagttccttgggatcgtattccgtcttgcgcagtgcggcttcgacttccatctgcgcgtttgacagctggtccagtgccgcgtcgagcagcgccacggtatcctccagcagccccggcgcctcatggctcttgcgctccagacggcgcaccagcgaggcgatatggggcacgggcgaggcattgccgttgaggaattcggaggcctcggcgatatcgccggcgattcgctccgccttcatcatcttctggcggcgttcggcgagctcgtcctcctcgccgtcctgcggcgcgagcttgtcgagctcttccaccgacgagcggatgtaatccgcctcgcgcgcggccgcctcgaccttctcgcggtgcttcttcagcgtccgctcgctgtcgcgccagacgcgatagagctgcgaaacgccggccacctcgtcggcgatgccggcgaatgcgtcgagcaggatacggtgggcgtgggtgtcgaccagcgcgcggtcgtcgtgctgtccgtggatctcgaccagcatctgtccggcctggcgcatcagctgcacgctgagcggctggtcgttgacataggccttggtgcggccgtcggcgctctgcacgcggcggaagatcaggtcgccatcatcgtcgatgccgttgtcgcgcaacagcgctcgcgcccggtggtcggggccgacgtcgaagacggcggtcacctgccccttgtcctcgccgtgacggacaagaccgccatcgccgcgcccgccaagggcgagcgacaggctgtcgagcaggatggatttgccggcgccggtctcacccgtcagaacggaaagaccggcctcgaaggcaagatccagccgctcgatcaggacgatatcgcggatcgaaagctggatcagcatcggctttaggtaccgaggagtttcttgccggcttgcgaaatccacgagccctgattctcacgcggctccgcgccgttgctcttcagcagcttgtaggaatccgcgtaccactggctgtcgggatagttgcggccgagaacggcggcggccgtctgggcctcttccgcgatacccatcgcgtaataggcttcgaccaggcgggcgagcgcttcctcgatctggttcgtgttcggatacttctcgacgacgatgcggaagcgcgagatggcggcaaggtattccttgcgctccatgtagtagcggccgatctgcatttccttgccggccagctggtcacgcgcgaagcggatcttcgcctgcgcgtcgtcgacatattcggaatcgggatagttgtcgatcacggcctgcatggcgtcgatggttcgcgacgcggcgcgctggtcctgggtcacgtcgacgatctgcttggaatagctgaggccgatcaggtactgcacgtaggcggcgtccttcgacttcggatactgcgccatgtagcggttgcccgaggccagcgcttcgtcgaggcggccctgccgatacttcacgaaggtgctcatcaccagacccttgcgggcccattccgagaacgggttgtcgcggtcgatcgaatcgaacttgcgcgcggcttccgccatgtttccggccttcatgttggccagaccctgactgtagagaacatcaggcggatcgctctgcaggccgagcttgctgatatcgatatcggggtccgactggcatccggaaatcaaggcacttgcgctcagcaccaggagcgatgcgaacaaagcacgcgctgtcttcatcatactttcagaccctgcataacccatcggaacatcccaaaagccgccatccctcaacggcagccacgcctcgcaggcgtttctagccacaaatgcatggccagagcaacgcattgatgatgcattaacgcatttttgtggcggccctgcccataatcgtctgttttctccggataatccccgactttgcacggctaaatacctgccgcgaaagctctatcgggaatcacggctgcctgctgcacaaaaagaaaccgcctcccgaaggaggcggccctggcctaaggaatgcgacggaggtcaagccgaccagggagcaaattcaggagcgttgacgcggatgaaatcgcgcggcgcgacgcgctggcgcggtgccgaggtctcgacgacttcataggcgctggaatcgctgagcagcgccttcagcgcgttggcgttcatcttgtggccgccgcgataggagcgatagcagccgatgaagggagcaccggcaagcgccaggtcgccgacggcgtcgagcgtcttgtgacgcacgaactcgtccttggcgtagcgcaggccctcgacgttgatgaccgtgtggtcgtcggagatgacgaccgagttttccagcgacgaaccgagcgcgtggcccgaagcccacagacgctccacgtcacgcatgaagccgaaggtgcgggcgcgcgacagttccgacttgaaggtggcggcggtcatgtcgccttcccacttctggcggccgatcagcggcgtgtcgaaatcgatctcgacctcgaagcgcatgccgtcataggggcgaaactcgctccacgaaccgccgtgctcgatgcgaaccggcttggtaatgcgaatgtagcggcgcttgacgccgagggataccagacccacctgctcgatcgcttcgatgaacggcatcgagctgccgtccatgatcggcatttcggcgccgtcgacttcgatgacgacgttgtcgaggccaagcgcgtagaccgcggccatcacatgttcgaccgtcgcgacggagcgcgccggggaaaagccgagaacggtgcacaggtcggtattgccaacctgggaggaaacagcgcgaagctcggtgacttcgccgttgtcatgcatgcgattgaatacgacaccagtgtcggcttctgctgggttgaaggtaatcgaaacgtcggcacccgaatgaacgccgatccccgaaagggtgaccgggcgcgataccgtcgtttgaaaacccaacatgccaataaccattaatcttgcctttattatccctgacgatccgccgcgacccttatgtcgaaactcattcgccaagtcttatttcctccgtcgcgatgctgcgtcaacgcgcagtcggacggttttccagcccatacatacgtgtgcccgcgccgcaatccaaatcactgtttctttcgcattgttacgaaagcatgcatttgaaatcacaaggcaatcaggcgcaaatcggagtgcctgatacaacaatgcccgggagcgaactcccgggctgattcgtggcgattccaggcgtccctatcagttcgactggcggcgaaggaaggccggaatttcgagctgatcgtcttcctgcatcatccgggcctgcggtacggcacggccctgatcgtccaggtttccgcgacgcggagcgtagaggcttgcttccggagacagcgggcggcgctgctgcgaggacgctgccggagccgacgtcatctcgggcgcgacttcctcttcgcggcgaccgagcgagttggtgatccgcttcaggagacccatcggaccacgctcttcatgtgcatgcgacacgggtgccggctgcgagcggtgatcgatctcggcctgaacgaccggtgggaaatcctcgaccttcggcatgcggaccggctgctgctgcatgacaggagcaggctgctgcatgaccggcgccggctgatgcatcacgggctgcggagccggctggtgcatcacgggtgcctgctgctggatcggagcctggcggatgaccggtgcggcttccggagctgcgaagatcttgctcgccgggcggaaggcttcctgcggagcaggctgctggtgaaccggggcagccgcgcgcggagcgtggatgtcgagttcgcgttccatttcggcttcggccatgcggatggtctgcgcgatctggtcggccttcggtgcctgctgcatgacaggggcaggctggactgcggccggagccggagcaacggccgccgaaggacggataatctgcttctggaccggctggaagcccttgccggcgtcctggttcatcgcgcggtcgatgccggtggcgacgacggaaacgcggatgatgccttcaagcgattcgtcaaaggtcgcgccgaggatgatgttcgcatccggatcgacttcctcgcggatacgggtcgcggcttcgtcgacttcgaacagcgtcaggtcgcgaccgccggtgatggagatcagcaggccctgggcgcccttcatcgaggtttcgtcgagcagcgggttggcgatcgcggcttccgccgcctgcatcgcgcggccctggcccgaagcctcgccggtacccatcatcgcgcggcccatttcgcgcatgaccgaacggacgtcggcgaagtcgaggttgatgagaccttccttcaccatcaggtcggtgatgcaggcaacgcccgagtagagaacctggtcggccatcgcgaatgcgtcggcgaaggtcgtcttgtcgttcgcgatacggaacaggttctggttcgggatgacgatcagcgtgtcgaccgacttctgcagttcctggatacccgcttcggccagacgcatgcggcggccaccttcgaagtggaacggcttggtcacgacgccgaccgtcaggatgcccttgttgcgggcagcttgggcaacaacaggagccgcaccggtgccggtgccgccgcccatgccggcggtgacgaagcacatgtgggtgccgttcaggtgatcgacgatttcgtcgatgcattcttcagcggctgcacggccgacttccggctgcgaacccgcgccgagaccttcggtgacgctggcgccgagctggatgatgcgctccgccttggtcatcgtcagtgcctgggcatccgtgttggcgacgacgaagtcgacgccctggaggccggcggagatcatgttgttgacagcgttgccaccgccaccgccgacgccgaacacggtgatgcgcggcttcagctcagtgatatctggcgtatgcagcttgatagtcatggtacccgttccttctctttatggccgcatcgccacgccggccaattcactcaatttctagaagctttccttcagccactggcccatccgggcgaagcggctgctatttccgccaagcgacatgagcagaccgctctgtgacgcatgtgtttcctgatccgcgacctgcggatagatcatcaggccgaccgccgtcgaaaacgccggccccttggctgccgtcggcagcccggagacgcccatcgggcggccgatacggacgttgcgggcaaggatcttgcgggcaacgtcggcaaggccggtcagctggcttgcgccgcctgtcagcacgacgcgcttgccgacgatcgggctgaagcccgagcgctggatgcggtcgcgaatgagttccatcgtctcctcgatgcgggcgctgacgatccgcgacaccagtgcgcgcggcacctgcgtcggcagatcgcggtcgtcctcgccgatcggcgggatcgagatcagctcgcgttcgtccgaggaattcggcatggccgaggcatgaaccaccttcagacgctcggcgtcctcgatgcgggtcgacaggccacgcgccagatcggtggtgacatgatgaccgccgagaccgacggcatccgtgtgcaccagcttgccctcggcgaagaccgagatcgtcgtcgtgccgccgcccatgtcgatcgcggcgcaaccgagttcgacttcgtcgtcgaccagggcggcaagaccggacgcgtatggcgtcgccacgatgccctcgacggacagatgcgcgcggttgacgctgagttcgaggttcttgagagccgtgcgctcggcggtcacgacatgcatgtcgacgccgagaacgtcaccgtacatcgacagcggatcgcggatgccgcgttcgccatcgagcgagaaaccggtggccagcgaatgcagcacggcgcgatcctggcgcagcgactgctggcaggccgccgccagaaccttcttcagatcgttgagttcgacttcctgaccgccgagatcgatggtggcggtgtagatgtcgctggtgaggcgtccggccgtcaggttgacgatcaggctctcgacggtgaggccagccatgcgctcggcggcgtcgaccgccagacggatgacgctctcgagcgcatcgagatccgagatcgcgccggtcttgataccgcgcgaacgctgatggccgatgccgatgatttcgatgttgtgcgtgcgaccggggagaatctggctctcctcgcgcggcgtcagccggccgatcatgcagacgactttcgtcgaaccgatgtcgaggacggagacgacatgcgaccgcttcgaagaaagcggcttcaggcgcggcaatccaaaatgggacgaaccgaacaagctcatatattctgccccgccttcttcaaatccttggtgcgctgatcaagaacaagctgacggcgctccatggcttcaggcgtcagttgaatggccgtacgatcggcaagacgcagatcgacagccgcgatatcgcgatcgagaagagcctgatcgctgttgaatttcgaaaggcgcgccagcgcctgatcgacatcgtcttcaggcaacttgacgacgacgccattgtccatgtgcagatcccagcgacggccggagacccagacataggccttcacgcgcgacttgatgtcgggccacttggaaaacgcatcgtcgagcgaagcggcagccacttcggcgccgcgaccgacgaccagcggaagctgcgaaaacttgttgtcgcgaagcggcgcgatgaccgccccgcccttctcgatcagcgaaagctcggtgccatgctgccagatggcaaaggccttgcgctccttgagcttcacttcgatggttttcggatagaccttgcggacctcgacgctctcgacccagggaagcttcgcgatcttctggcgcgccgcatccacgtcgagcgccacgagcgacgtcgtgccgtcgagaccgatcagctgcaggatgtcgatttcggaggtctcggaattgccggacaccttcacatcctcgacggcgaagcctgccgcggccgtcgtcgcctgcgcgaccacctcggtgtgaccgccgagagacatgccgtaaaagcccgtcgcagcgaagaaaaccagcgccgacaccgtacccgtatgagaaggaatgtagatgcggccgctgccgaggctgaccaggaagcggacgacgcggcgcagcggccgcggcagcacgatccgcccgtcgccttccgcataggaagtctcggcttgatggcttgggcgccccatccttttgaccgttaccgagaacaagaagcgtcctccaccatccaacgaagaaattcaccaaacgagtagccggcatgaccggccatttcgggcacaagcgatgttggagtcatgcctggctgggtattgatttccagccagatgatttcgccgtcttcggagaagcgatcgtcataccgaaaatccgaccgactcactccacggcaaccaattgcttgatgcgcccttaatgacaatgattgtattttttggtaaatattcggtgaaattttcgccggaatgacgtgtttcgagccacccgccacatacttggaatcatagtcgtaaaagctgtgaccctgcggaacgatctcggtaacacccagcacagtgtcacccatgacgccgcaggtcagctcgcgtccgtggatgtaacgctcgacgagaacctcctcgccataccgccattcggacgagccgatgatctgcggcggacgcgactgatcctcctgaacgatgacgacaccgaagctcgacccctcgcgcaccggtttcaccacatagggcggcttcatcggatgctcggcggggaaagaaaagcggttgatcacctgcgacgcggcgaccggaatgccggccgcggccgcgacgcccttcgccttgctcttgtccatggcaagcgcggaggccagaacgccggaatgggtgtagggaatttcgagatattcgaggatgccctggatcagcccgtcctcgccgaacggcccatgcagggcgttgaacgccacgtcgggcctgagcgcggagagcttggcggacacgtcgcgatcgacgtcgatacgggtaacctgaaagccttcggcctcgagagcatccgcgcacgccgccccggacgaaaggctgacaggcctctccgaggaaaatccgcccataaggacagcgacatgcttgcgactcatagatacccccaaaataatccgtactctgcattccaagacttgcaccaagctggctttcttccgaatctggcttgcccggcgcacatgtattagagcgccattatggttaacgaagcgtttactttcgttaacttcctggccggccggtcatgaattgggacggtcggaaaccgttggcggaaggcgaaaaccccgcaacgccaagcgttaccgccgaaatgtcaaagcgaaacaaaaagtttaagccccggcgccaaaccgggatcggccgccggtcgccgccggaccggagcggcgagcgctcgtccttccatcgcgtccgccgaaggtacaaaggcgggcttcggcgcgatcggccgccaggctttccgcccaggaaaggaagcgcactagtttttgtcggtttgttgcgcgattggcatttgcgccgacttaaaattgcgttatgagcccgtggcctcgaagaggcgaatacctgatcccgattggaataaaaatgtcagacgcgatatcaaaagtatcgccgacctccgcttcatcgaacaatgcgcagctcaactcgccggcgcgcgttctgatcgcaagcgtcgtcggcaccaccatcgaattcttcgacttctacgtatacgcgacggccgccgtgctggtcttcccgacgctgttcttcccgaacagcgatccgaccaccgcgctgctcgcctccttcgcgaccttctcgatcgccttcttcgcccgcccgctgggcgccgtggtcttcggccacttcggcgacagggtcggccgcaagacgacgctggtcgcggcactgctgacgatgggtatctccaccgtcatcatcggcctgctgccctcctatgaaacgatcggcgttctggcacccctgctgctggcgatctgccgtttcggccagggcttcggccttggcggcgaatggggcggcgcggtgctgctggcgaccgaaaacgcgcccgagggcaagcgcagctggtacggcatgttcccgcagctcggcgcaccgctcggtctcttcctgtcctcgggcatcttctggctgctgctgcagtttatgccgcaggaacagttgctggcctggggctggcgcgttcccttcatcgcctcgatcgtcctgatcgtcatcggcctttgggttcgcctatcgatcaccgaaacgccggctttccagaaggccatcgacaagcaggaacgcgtcgccgttccggttgccgaactcttccgcaagcacaagcgcagcctgttcctcggcaccttcgtggcgctcgcgaccttcgtgctgttctacatcggctcggcctatctgctctcctacaacgtcaaggtcctgaagatcccgttcctcgacgcgctcgagatccagatcgtcggctccatctccttcggcatcttcatcccgatcgtcggcaagctcgccgagcgtttcggccgccgcgagatgctgatcctgaccaccgtgctgatcggcctgttctccttcctcctgcccggcctgatgtccggcggcgaaggcagcatcctggtcttcgcgatcgtcgccatggcgctgatgggcatgacctacggcctgatcggaacggcgctcgccgcccccttcccgaccgccgtgcgctacaccggctcgtcgatcaccttcaacctcgccggcatcttcggcgcgtctctcgcgccctacatcgccacctggctgcaggcgaactacggtatgctctatgtcggcttctatctcggcctttcggccgtcatcacgctgatctgcatcctggcctcgggccgcgacgaagtctgatcgaagcgttcatcgccaatcgagggccgcgacgggaaaccgccgcggcctttttcgttcttgtctgttaacgccccgcctctattctcgacacgggcaacgggccggggagagacgcgtgctgacaagacgatcgctgctgacgcatggccttggcgccggcctgtcgctgggcctgccgccgctcgcccgcgccgccggcatccccgatatcgacgtcaccttcctcgtcatcaacgacgtacatgcctgccgcatcggcgacggcctcagcccgaactgccaagacgagggcaagaccgacgccaacctcctgcgccacatcagggcgctcaacaacatccaccgccagacctggcccggggagatcgacggcaaggccaccggcttcgcgctgtcgggcgagcgcatcgccaggccgcagggcgtcatcgtctgcggcgatgtcaccgatgacggcggcggccagatggcggaggtcgcggaaggctcgcagctcctgcagttctcgcatcgctaccagcagggcccgggcccggaccgtatccacttccccgtctatgtcggcctcggcaatcacgatctcgaccaggacggacgtcccccgcaggtggactggtaccgcgacgagctgcgcgactacgtgcagatgaaccacaagccgagcgtcttcttcaagccggtcgtgcccgtcgacaattacgacgaggcctccgacaactactcctggaactggggcgggctgcacctcatccaggcgcagcgctatggcggcgacagcacccggggaacggcaagcagcctcgactggatgaagcgcgacctcgccgcctacgccaaggacggccgcccggtcgtgatcttccagcactatggatgggacagcttctcgcgcgagcgctgggaccccgaaaagagcaccttcaccatcgagggcagcggcgcaccgcactggtggggtgaatcagaacgtcagcaattgctcgcaacccttgagggttacaacgtaatcggcattttccacggccatgagcacgatacgcccgcgacctacaaggccggcggcatcgacgtcttcaaggcgcgcgccgccttcatgggcggcttcggcctcgtgcgcatcaaggggaatacgatggatgtggcgatcggcgacgccaccgacggtgtcggcggggtgaccttcaccaccgccttcaccaaacgtttcggctagggcatgtcggacgagatcccgacatgcgacaggttctagcgcttactcgctcgtcacgccctggaacggacgcacttcgcggcccggcatgaacagacccaggcgcttgatttcccattccagcttgatgccggaattctcgaatacctcgcggcgaacctgctcgcccagatattcgagatcgtagccggtcgcctggccgttgttgatcatgaagttgcaatgcagcgacgacatctgcgcgccgccgatgacgagcccgcggcatcccgcctcgtcgatcagcttccaggcggagtggccctcggggttcttgaaggtcgagccgccggtcttctcgcggatcggctgcaccgtctcgcggtggctgcgcaccgcatccatgtcggcgcggatcttggcgcgatcctcggcatagccctcgaacagcaccgaggtgaagatcaggtcgctcgaagccgacgaatggcggtatgcgtagcccatgtcggcattcgacagcacgtgcttgttgcccttgcggtcgatcgcggtcacctcgacgacgcggtcgcgcgtctcgccgccattggcgccggcgttcatgcgcgcggcgccgccgatgctgccgggaatgccgtagtagaagtggaagccgccgatgccgttgtccatcgccatcgccgcgacatgcttgtccgggcagatggcgccggcgcgcacgcggttttcgcccgccagttcaaccgagccgaagcccttggccgaaaggcgcagaaccacgccggggatgccgccgtcgcgcaccaggatgttggagccgacgccgaccacggtcatcggcacgtcctcgggaagaatcgacaggaaggcgatcagatcctcttcgtcgtgcggctggaacatcagttccgcgagaccgccggcatggaaccaggtgacgcgatccatcggcgcatccggtgtaatcctcccgcggatgtcctttacaccgtcgcccagcgacgcaagaagcttttgcccattcacctgtttcatgcggatctacccgaaaggccttccagttgcttgggcagcgctgccgcccagtaagtgatactcccagcccccaacagaaccacgaaatcgcctggctttgcaatctctgcgaccatttcaggcaaaagctcgggagaagcgaggaagcgcgcatcgcgatgcccgcccgatttgatcagcgacaccagcgcttcggcgttggccccttcgatcggctcttcgcccgcagcatagaccggcgccaggaaaatgctgtccgcgtcgttgaagcaggcggcgaactcctcgaacaggctcgccaggcgcgaatagcggtgcggctggtgcacggcgatgacgcggcccttgcaggcctcgcgcgccgccctcagcaccgccttgatctcgacggggtggtgaccgtaatcgtcgaagatctgcacgccgttccattcgcccgtcagcgtgaagcggcgcttgacgccgccgaaggaggcgagccccttggcgatatcctcgctcgacatgccgagacggttggcgaccgcgatcgccgcggtcgcgttggagatgttgtggcggccgggcatcggcatgacgagattgtcgagcttgatcacctggccggtgcggcggcgacggatctcgacgtcgaagatcgagcgcgcgccgtcgatgcgcacattcatgaagcgcacgtcggcctgcgggttttcgccataggtcacgaccttgcggtcctcgatacggccgaccagcgcctgcacttcggggtgatcgaggcacatgacgccgaagccgtagaacggcacgttctcgacgaactggcggaaggcggcgcgcacggcgtcgaaattgccgtaatggtcgagatgctcggggtcgatattggtgacgacggcgacgtcggccggaagcttcaggaaggtgccgtcggattcgtcggcctcgaccaccatccactcgccctcgcccatgcgcgcattggtgccgtaggcgttgatgataccgccgttgatgacggtcgggtcgagcccgccggcttcgagcagcgtcgcgaccagcgaagtggtcgtggtcttgccgtgcgtgccgccgatggcgatcgcattgcggaagcgcatcagctcggccagcatttcggcgcgacgcacgacgggcagcagcttctcgcgggcggcgatgagttccgggttgtccttcttgatcgccgtcgagacgacgacgacctcggcatcgccgagattctcggccttgtggccgacgaagacctcgatgcccttgtcgcgcaggcgctggacgttggcgctatcggcctggtcggatccctggacgcgatggccgagattgtgcagcacctcggcgatcccgctcatgccgataccgccgatgccgatgaaatggacgaggccgatggccttcggcattttcatgcgcttttccccttgaactctgcaattgtacgtcccgccgcaatagcctctaccatgtcggcaagcaagttcgcggcatcaggtttacccgcctgcttggcggcggccgccattcgggcgagtttttccgggtcgttcatcgtgtgggtcaggatcgaggcgatcttttcggacgagagttcggcctgcgcgatcaccttggcgccgccggtcgccgccagcgacgcggcgttcgccgcctggtcgtggtcgagcgcatgcggataaggcaccaggatcgccggacggccgatcaccgagatctccgacaccgtcgaagcaccggagcggcagatcaccagatgcgccctggccagccgttcggccatgtcggtgaagaagggagcgatctcggaggaggcgcccatgtcgagcttggcgacgcaatcgccgaccatgcccatgtcctccgggcggacctgctgggtgatcctgagacgcgcgcgcagatcgtcgtcgagcaggctgatcgccgtcggcatcgccttggagaaatactgggcgccctggctgccgccgaagacgacgagattgaaaggctctcccgcgcgcgacggcgtatagggcgtcctggcggcctcgatgacagccggccgcaccggattgccggtcgtcaccgtcttctccgcaaaggcaccgccattctcgggcaggaagccgccggcgatcgccttgacgcgattggccagcgccttgttggcgcggcccatcacggcgttctgctcgtggaccatcgtcggcacgccaagccgcgaggcggcaagcagcggcggcaccgtcggataaccgccgaagccgacgaccacgacgggcttcagccgcccgatcagccgcttggccgcccgcatgccgctccaaagcgtccacagcgaccgcgcgaccgcgaccgggttcttcgaggcgatcgtggccgacggcacgacatggatctcgtcggccggaaacttgccggcgtagcgctccgcccggctgtccgtgaccagatgcacggaatagccgcgttccttcatcttgtaggccagggcctccgccggaaacacgtggccgccggttcccccggcggcaagcagaacgatgcctttgctcatgaacccttactccgccggaatgccgtgcccgacgcggaacaggctccgctcctgcgcacgcttttccggtctgtggcgcgtcagcgcgagaatgaacccggccgtgacgcagatggcgaccatcgacgaaccgccgtaggaaatcagcggcagggtcatgcccttcgccggcagcagctcgagattgacgcccacgttgatgatggattgtatgccgatctgcagcacgaggccagcgacggcgaagcggctgaaatcgttgcgctccttgtaggcatgcgacaggccgcgcaggacgagcgccgaaaacagcagcaccagcgcgatacagaagatgatgccgaactcctcggccgcgaccgaaaagatgaagtcggtatgcgcgtccgggatgatgcgcttgacgaggccttcgcccggtccctggccgaaccagtcgccgcggatgatcgcttcgcgggcggtatcgatctggaacgtatcgccctcgccggtcatgaacttgtcgaaacgcagcgccacgtgcgggaagacgtagtaggcgctgacgagaccgccgacgccgagcgcgccgagcacgatgatccacagccacggcatgcctgccatgaagaacatgccgccccagacggcggtggtcaggatcgtctgcccgaggtcgggctgcgccaccagaagtgccgcgacgatcccgaagaggatgatggcgaagagattgccgggaatctcgggctgccgcgcatgctcggcgaagagccaggcgcagacgaccacgaaggccggcttcatgaattcggacggctggatcgaaatgccggccagcgtgacccagcggcgcgaacccttgacctcgacgccgaagaacagcgccatcagcatcaggatgagtgcggcgatcagaagaatgatcgccgtcctgcggacctgacgcggcgtcaggaacgaaagcccgatcatcaccgccagcgacgggatcatgaaggcagcctggcgcttgacgaagtggaacggctccagcccgatgcgctcggccaccgccggcgacgccgcgaaggagagcatcaggccgatccccatgaggaagatgaacatcgccaggaagaaccggtcgatggtccagaaccaatcggccaatgccccgcgttccgcacgacttaccatgtcacttctctcctgttgccgaaccgatcagcatggttatcccgtcgagcgctgccacatggctgacgaatgcatcgcccctgacttcgaagttcttgtactggtcgaagcttgcgcaagccggtgctaacatgaccgccgatggcccgctttcgtcctggcccgcatccgcggccgcatgcgcgaccgcctggtccagcgttccggaaatctcgtagggcacggcctcgccgagcgtagccgcgaattccgcggccgcctcgccgatcaggtaggccttggcgatgcgtggaaagaacggcgcgagcgtcgtgatcccgcccgccttcggcaggccgccggcgatccagtagatacggtcgtagctcgacagcgcgggcgccgcggcatcggcgttggtcgccttggaatcgttgacgaacaccacattgccgcgctggccgaccggctgcatgcggtgcttcaggcccgggaaggacgcaagacccgcgcggatatcctcgaccgagacgccggccgcgaggcacgcggcgacggccgccgccgcgttctgggcgttgtggctgccacgcagcgtcggaataccgtcgagatcggcgatcggcagggcggcgccggaatgtgcctggatgagccgcgtgccctcggcatagatgccgtcggcaagcgcgtggcggcgggagatgcgcgtcaccttgccgcccgcccgctcgatccggtcggcgatcctctcgcaatggctgtcgtcgacgccgacgatggcgacgtcgctgccggcgaccagccgttccttgacgtcggcatagtgttgcatcgtgccgtgacggtcgagatggtcgggcgtgaggttgagcaggatgccggccgacgggttgagcgtcggcgcgagatcgatctggtaggaagagcactcgacgacgtagaatcgaccagccttcggcggctcgagcgtcagcaccgccgtgccgatattgccgccgagctgcgtgtcgcggccgctcgccttcaggatatgggcgatcagcgccgtggtggtcgacttgccgttggtgccggtgatggcgatgaacggcgcgtcgggggcgtgcgcccggcgctcgcgcacgaagagctcgacatcgccgacgatatcgacgccggcggcgcgcgccagatcgaccgtccagtgcggcttcggatgcgtcagcggcacgcccggcgacagcacgaacagcgactgcgcgttccagtcgatcgtcctgagatcggcggtatgtattccttcggccgcggccttggtcacgctgtcgggattgtcgtcccacgcggtcacctcggcgccccccaggatcagggcgcgcgccgtggcgaagccggaaccgccgagcccgaagagcgcgaccttttttcctgagagcgtggtgaccgggatcatgatcgtcctaccgcagcttcagcgtcgacaggccgagcatggcaaggccgacggcgatgatccagaagcggatcacgacctggctttcggtccagcccttcttctcgaaatggtggtggatgggcgccatcaggaacacccgtcgcccggtcatcttgaagaagccgacctggatgatgacggacagcgtttccatgacgaacaggccgccgatgatcgccatgacgatctcgtgcttggtggcgacggcaaccgtgccgatcgtgccgccgagggccagcgacccggtgtcgcccatgaagatggcggcgggcggcgcgttgaaccacaggaagccgaggccggcgccgatgacggcgccgagaacgacggacagctcgccggtgccgggcacgaagttgatctgcaggtagttcgcgaacacggcgttaccggcgagataggcgatgacgccgaaggaggcggccgcgatcatgaccggcacgatggcgagaccgtcgagaccatccgtcaggttcaccgcattgccggcgccgacgatgacgaagccgccgaagaccacgaacatgatgccgaggttgatcaggaagtccttgaagaacggaaaggcgaccgaagacccgaaggtcgaaccggcaggacccgaggcgagcgacgcccgcatcatgaaatagacggcgatgccggcgatgacgaattcgatgccgaggcgcgccttgccggaaaagcccttgtggctctgcttgctgaccttgagatagtcgtcataaaagccgatcgcgccgaagccgagcgtgacgagcagcgtcgccacgacgtagatgttcgacagatccgcccacaaaagcgacgagccgacgatgccggccaggatcatcaggccgcccatggtcggcgtacccgccttcttgaagtgcgtctgcggaccgtcggcgcggatcggctgacccttgccctggcgcacgcgcagcgaattgatgatcatcggtccgaacaggaaaacgatcagcgcggaggtgaagagagaggcgcccgtgcggaacgtaatatacctgaacaggtttaggaatttcaggtgttccgacagttcgactagccaaatcagcattcagggccccttgtttacccgctcaaaattcgcgttgcgtgtcggcaaatggcgggaacttgtcaaggagcgcggcaataatcttgccgaaaccgaggcccaatgacgattttaccatcagcacgtcgcctaccgcgaccgagttcagtacgtggtcgatgagttcgtcggtctgggcgcgatgcacgaccgaaacgctctcgggaagtgattctttcagcgccagcatctcaggcccggcgagccagacatgttcgataccggcggccagcagcggtcccgcgagatcggtgtgaaccttctgcgaatagtcgcccatctcgagcatgtcgccgagaacggcgatccgccgtcccgatcccgtgggtacggagctggcgagcagcgcgatcgccgcgcgcatcgatgtcggattggcgttgtagctttcgtcgatgacggtcaggctgccgtggccgatcgacagcttgtggcgtcgccccctgcccttttcggcctgcagcgtcgcgagagctgcgatcgccgactgcatgtcggcgccgacgatcctggcgacgccgagcgctgccagcgcgttctcggcgatgtgccgcccgggcgcgccgatcgccacctcgtgcgtctcgccgtcgatggtgatccacagtgtcgagctctggtcgccgccgttgaactccgccatgcggaaatcggccttggcgtgctgcccgaacgaatggatatgctggatgccgcaggcctgcgccgtgcggtcgaggaaattgaactggtcgttgtcgcggttgagcacggcatggccgcctggcacgacgccctcgaagatctcggccttggcggtcgcgatttccttgatgctcttgaagttgccgagatgcgccggcgcgatcgtggtgacgacggccacatgcggctcgatcatcttgaccagcgggcggatttcgtccgggtggttcatgccgacttcgaagaccccgaaataggtgtcgagcggcatgcgcgccaaggtcagcggcacgccccagtgattgttgaaggatgcgaccgacgcatgcaccttgcccgacggcgccagaacccggcgcagcatctccttggtcgtcgtcttgccgaccgacccggtgacggcgatgatctgcgcacgagaacgagcccgcgccgcaagcccgagcttgcccagcgccacaagcacgtcctcgacgacgatcatcggcaccgtcaggcggccgagcgccggcaggcgcgcctcgctgaccacgagcaaagccgcgccattggccatcgccatcgacgcatagtcatgaccatcgacacggtcgcccttgatcgcgaagaaggcctcacccggctggatcgtccggctgtcgatcgcaatcccggtaatgccctccggcaagctgccgaacgggcgcccggccatggccgtgatcatgtcctgcgtcgtccaaagccagctcacgatttcagctcctccaaagccttgcgcaactcggcgtgatccgaaaacggcagcgtgacgccaccgatcgtctgcccctcctcatgccccttgccggcgacgatcagcgtgtcgcccgacgtcagcatggcgaccgcctcgcggatggcctgggcgcgatcggggatctcggtggcgcagggagccgccaccatgatctcggcgcggatcgatgccggctcttccgagcgcggattgtcgtcggtaacgacaacgacatcggccagccggcaggcgatctcgcccatgatcggccgcttgccgcggtcgcggtctccaccgcagccgaagacgacgatgacacggccggtcgtgaacggacgcacggattcgagcacattcgaaagcgcatcgggcttgtgggcgtaatcgacataagcgagcgcgccgtccttggtgtggccgaccagttcgaggcggccggacgcgccctgcagcttttcgagcgccgccatggcgaccttggccggaacgccggtggacatggcaagaccggcggcgacaagcgcgttggccacctggaaatcgccggcaagcggaatgtcgacctcgaagatctgtccctcggcgtggatttcggccacctgcttgtggcggaaatgctcgacgcgcttcagcgtcagatactcgcccttgcggccgacggtgcgcacgatatgcccggcatcgatcgccgccttgatcgcctgctccgaccatgcgtcgtcggaaaagatcacggcgggcgcgcccttcggcagcagcgtatcgaacagccgcatcttggcggccatgtagtcctcgatcgtcggatggtaatccatgtgatcgcggccgagattggtgaaggcggccgcggcgagcgtcacgccgtcgagacgcgactggtcgaggccgtggctcgacgcctccatcgaggcatgcgtcacgccctcgtcggtcagttcggccagcagcgcatgcagcgacaccggatcgggtgtggtcagcgagccgtaatcattgcgggtcggcgaaacgacgcccgtcgtgccgatcatcgcggccggatggccggcataggcccagatctgccgcgtgaaggaggcgaccgacgtcttgccggcggttcctgtcacggcgaccatggtttcgggctgcttgccgtagaaattcgcggcggcgagcgacaggaagcggcgcggttcgttgacgacgaggacgggaatggaggcttcggtcgcatgcgaggcgaccgccacgacggcaccgcgcgcggcagcgtcggcgatgaagcccgcgccgtcggccttggtgccggagacggcgacgaaagccatgccgggcgcgatcttgcggctgtcggcggaaaggccggaaatctccagcgcgcccaccggcccgttcagttgttccttcagttccggaaacgcatttccggcgatgtcccgcagtttcatcgaacgcacacttctctttcgagccgtctagcccccatggcgaatcggccgcgacattcatccagactcaataagacaccaacatggccgatccgtcgtcaccgaacttcggttccacaccgaggattggcgccgcccgggagatgatgttcttgaccatcggagcggcggtgaacgccgcgatgttctggcctttctcaccattatgcggctcgtcgcagaaggtcagcaccacatatttcggatcgtcgatcgggaaggcggcgagaaaggcgttgaagttgaggttgctggcatagcggccgttgaccaccttgtcggcggttccggtcttgccgccgacattgaagccgggaacgtcggcattgcggccggagcccttgatgccgttgagcttgaagagatagcgcacgtcgtcgctggtggtcttcttgaccacgacttcggcgacatcgtcggcctgctggcgcgtgcgcggcaggaacgtcggctcgatcagcctgccgccgttgacgagcgcggcgccggccaccgccgtctgtagcggcgtcgtcgagacgccgtggccgaacgagatcgtcaccgaattgatcttcttccagaccttgggctggctcggcatcttcacttccggcagctcggtctgcatcttggtgagaaggccgagcttcgtcagataatccttctgcgcatcgataccgacgatgtcgatgatgcgggcggtaccgacgttggaggaatactggaacacctcgggcagcgtcagccagcgctgctggccatggaaatcgtgaatggtgaagccgccgatgcgcagcgactgcctagcgtcgaagctgtccgtcagcttgaccttgccggtgtcgagcgccatggcgagcgagaacgtcttgaacgtcgaccccatctcgaacgtgccgttcgacatgcggttcagccagccctccttggcgccctcgagcgggttgttcggatcgaaatccggggcggacgccatggccagcacttccccggtattgatgtcgaggatgacggcgcccgcacccttggcttcgtagttggtcacggcattggcgaccacgtcgcgcacgatgttctggacgcgcacgtcgatcgacagcttgatcggctcgagcggctggtcgctggtcatgccgacggaggcgagatcggcgagcccctggtcgtcgatatacttttccatgccggcgacgccgcgattgtcgatattgacgtagccgaggatatgcgcggcggtcggaccaccgggatagaagcggcgcttttccggccggaagccgatgcccggaatgccgagcgccaggatctggctctgctgcttcggcgacagctggcggcgcagccaggcgaagtgcgaattgcggttggcgagcttcttgtaggtgcccttcatgtcgagatcgggcagcacggtcgtcagcttctcgacggcctcgtcggcatcgacgatcttgttcggctcggcgaacagcgagaccgtgcggatgtctgtggccagcacctcgccgttgcggtcgagaatatcggggcgcgacgccagcaggcggtcgggcggcaggatgctggagacggtatcggggtcacgcacggcatattcgaccagacgcccgccgatgacgagatagccacagacgaaggcgaaagccagcaggcccacccggctcttcgcctgaccgctgcgcttcttgcgccagcccgggatcggcgcgttgccggccgatccgccaaaccggctgtagacgccggatgagaagtgcgcctggctcttggcgaccatgatgcgtgaaagaaaggacatctctactccaccgatccggttaccaggtcgtcttcggcctcggcgggtttcgccgccatgatcttcggcttcggcttcgcgccggccttggcatcggccacctgcggcaccggaacctgcgacttcagcatcggcagctcctgcgggcggaccagcgaagtcgagagggtgggctgcagctgcagctcgccattgtagttggccaccagccgttccagccggttcggctgcgactgcagggcccagtcggccttcaacaggtcgatcgtatccttctcgagcttgatctcggtttcgaggcggcgaacctcctccagcttcagctcggcgcgatgcttgatcgtgtaggtcaccgcggcagccgccgtcatgacgccgatcaggatgaggtcgaaggttctcagcatatcaggctccgagctttccgaggcttgcgaggttgggcagtccgaagatcgacatgtcggcggcttccgccggcgccgtggtcctgagaccggcgcgcagcttggcggagcgggcgcgcggattaagctcggcctcggcgtcgctcgccgacaccattggcttgccgatccggtcgaaggtcgcggcgcgttcgtgggcgatgggcatatggcgcgagccggatgccttgccggcgcgatcggagaagaaggtcttgacgatgcggtcttccagcgagtggaaggtgacgaccacgaggcgaccgcccggcttcaacgcctgctcggccgcgaacagcgcctgcgccagttcgccgagttcgtcgttgacgaagatgcgcagcgcctggaacacccgcgtcgccggatggatcttgtccttcatcttgcgcggcgtgacgatctcgatcaggccagccagatcgcgcgtcgtctcgaacggcttctcggcgcggcgtttctcgatcgcatgcgcgatgcgcggcgactggctctcctcaccgaggaaatggaagatgcggatgagttcggcgaccttggcgcgattgaccacgtcggcggcggaaacgcccgatgccgacatgcgcatgtcgagcgggccgttcttctggaacgagaagccgcgatcggcctcgtcgatctgcatcgacgatacgccgatatcgagcacgacgccgtcaaggccggcggccggcgcatgatcggccagccgcgaaaactgcgagtgaatgagcttcagacgaccgccatgcgcggccaccatcgcctgcccgccggagatcgccgtcggatcgcggtcgagcgcgatcacctcggcgccaccggacagaatggccgacgtgtaaccgccagcgccaaaggtaccgtcgagaatgaccttgccggccgcgggctcgagcgccgtcaggacctcattgagaagaaccggaatgtggcgaaccggtccgccaccggcatcagttgaaccttcgccaggattcgccgccattccgttccctcgtgttacgaggaacgcttgcccgccagcctgcgctcctctcgtgctcgttgctgcaccgcctgaaattccttcggctgccacagctgaaaatgatccgcccgaccgacgaaggtcacctcgtccgagataccggtgaagtcgcgaatgaagtccgtgaccgtcaaccgcccctcggcgtcgagcttcatgaagaccccgcccccgtgaatgagcagcgacatctcgttcgcttccggcgaaaacggatcttccgcagcgatctgccgctcgaacctttcgagaaggtccgaaccgccgacgctgatcgccggaaacacaaaatcctggaagcagtacaaatcctggatgttgccttgcgccatcaccgatcgaaacgctgcgggcacggagaccctgcccttggaatcgatcctgttggtcgcatgtgaaaggaagcggcccatgacacgaaacatccgttcccgaaagagcccggacagcaattaggcgccccgaactccatttctcagacacagcttcgccagccggatgaacgacattccatccagcgcctccggtaaggagtacgcctctactttgcgattgatgggcacttgattgcccttgcgcagtgcaggaatgggatagcatgggaccatatgggcgtcaatgggaaacgcccgtctcacgatgagcgcagtatcgaaaatttataagctgttaagtttaacaaagggttatgagcggccgatttcccgaccttcgagacgcccccgaagagcgtcgcgaacgacgtcccagacatccccggttgcggaaagaaaattcgggcacgccgcgcaggtgaaaactcgaaaacgcaactttaaatgcacattttgttcccggctgatacggcaacctcaccgtccggccacctgcgttattgcggcctttctttcctactatggcattaacgtaaaataatgtattttagctatcatgcatacgcaaagacaaaaacatatccatttgcagaacaaacaaagaaaacacggagaaactccatggcgagttttagcttcaagggaatgttaagcggaatgaaaacgccgaatactcagcttccactgaagaaagtcggcatgacttctgaaattcagtgcgcaaactgtggaaaactactgaagcgatggtcggcgctttcgctcagcaccacggtctgcgaggaatgtcttcggcagccgcccacgtctcactgagccccgaaaggatcagtgaaatcgtatggacgcggataaaaaagcaatcgccagttggcctgtaagccgggttctgtatggctccggccgaaaccggaacgtggcagccattcctctgggacaacgtttgcacgttgcctctcgcaacccacccggatgactggcctggaaaccagccggacggcttgcgccgtccgcgtcatccctattcggtcttgctcccggtggggtttaccttgccatcgccgttgccggagacgcggtgggctcttaccccaccctttcacccttacctgccgaggcaggcggtttgctttctgtggcactttccctgaggtcgccctcgccggacgttatccggcaccgtgtttccgtggagcccggactttcctcaccctaccgtctttcgacattggtaaagcgcggctgcccggccaactggtccggctcccttaaccgagacggccgacgaatgccaacaaaatatcgctcgagccttatcggaaatacggtttgaaatccgtcgcgtagccctgtccgttgattcgaccttcgagcaggagcgttgcgccgagccggccgatctcgtccgagctcttggccgccgtgccgcaaccgcccgtcagcacgccgatgcgcggcgacgcggtatagccgatcatcggatggccgctcggcgtgaacgacacgacgcaggagccgctcgatatcgagagcggacgaagctccggcaccgcccgctggatcagccgcgtcagatgcaactggacgctcgcgcgcccatcggtcttgaaccacgagcgcagctccggctcgcgctccagcctgacatcatcgggatcgccgccgatcttcatgtagaacttgccgtcgggataacggatcggcggcagcatgtagaagtcgtcgagaccatcggcgccgtgcgagatcagcgacggcatgccggcgaaccgcgcggcggccgcctcgtcgatctcgtagaaggcgatggtgcgcgcgtagaccttgagatcgacaggccgcggcaagagattgtcggcaatggaaaagccgccggcggcgagcagcaccttttcggcccggtagcttttcccgtcggacgtctcgacggcaaccagaccgccctcctcgcggattgccacggcgacctcgcgaatgaccgaggccccggccttctcggcggcgatcgactgcgccctgacaagattgcgcgggctgatatgcccggcacccgtcggctcgtggacaccctcgctaccggcggcaaaggcgaagaacggaaagcgttccttcaagccgtcaccgtcgagcagcgccgtctcgacgcccagcgaccgggcggcggccgatgtgcgctcgacataggtatccgcaccaccgcgctcgggaccgaccaccaggcagccggcaggcgtatggaaggaaacgccgctctcccgctcgatctcggcgtagcgcccgatcgagcgattggcgagcaaggcccaatcgcggtcgggatcgatggtgcgggtgatgcgcccctcgtcgtaatggctggcgaaaacgccgtcatgccgcttgcgatcgtgcggctcgtcgggtccgatgacggcaacgccgtcagtcgacttggcgagatgccgtgcggcggcggcacccatcatgccccggccgacgatgatgtatctgaaatccgtgctcatcaccgttccgatctatcgaaagcagggcgtcagctgccggccgaaatcggcatcgccaagccgcccttccgacagcagaacggcaccaagccttccgagctcgtccgacgacttcgcggcaacgaaattgccgcccgtcagcaccgcgatgcgcggcgaggaggtgaaaccggcatagggataggcggtcggcgtgaacgtcgcgacgcagggcgccgatgtcaccgggcatccggcaaggtcgggcatcagctccagagccgtggcgaccagcagatcgcgctcggcgggatctccgtccgagcggaaccaggcaccggcatcctcgagcgtgtcgaagctgcgcgcctcggtatcgccgccgagcttcagataggtcttgccgtcgggatagcggaccggcgggagaatatagacatggtcctcgtcgcgatcgccgaagacgatgctcgacggcatgtcgccgaagatcgccttttcgcgctcgccgagctcgtagaagacgaccgttcgggccgcgacgcggatatcgacgggcgcgggaagaagccgattgaagttgctgaaaccgccggccgcgacgaggacgcgctcggccgtataaagccggtcgccgacgctcacctcgacatgggaaccggcatccctgacaccggtcgcggtcgcatcgatgacggtgacgccgcccgcttcggcaagcgccgtctgcgcgcgcaccagcgcccgaggattgacgtggccggcgcggctcttctcgtaatagccgctgaagctgtctcggagagtgaactcgggaaagcgctggcgcaaggccgccgcatccagcacctcgtactggacgccgagcccgtcggaaacctcgatcgcgcgcccgaggtaaccctgccccggttgcggcacgggccccgcgaacaggcatcccgcctccgtgaagaaggagatgccgctcttcgcctcgatctcggcgtagcgattgagcgagcgggcggcaagcgtcgcccagacgatgtcgtcgtcgaaggtgcgcgtaatgcgcgcctcgtcgtaatggctcgcgaacacgccgtgatggctctttcgctcgaccggttcccccggcccgatcagcgccaccccttcgctcatcgcgctcagatggcgggccgcggccgcgcccatcattccgcgcccgatcacgattgccttgaaatcacatgccatgtctcacctcgtttcaaggtcagatagcacgatctccaagttgaatcatattcttaagtcattcacccaggtgattccgccacaagccgtttccgcccgtggccatctcatccggcgatcagttgatcatcgccagcaccttgccgcaataggccttggacaccgggttcatgcgcgtcgccgcgtggccggcattgtacttgagaatggtatcgcaggtctcgccgccaccgagcgtctgcgccgcggccagatacttcatgccgtatttgaggttggtctcgggatcgaaaagccccttgctcgaacccgaatagcccatcatccgagccgtcgccggcttgatctgcatgaggccgatttcgccggcgctgccgcgggcattcggattgtagttgctttcgatacgaacaaccgcctgcgcgagttcgaccggaacattgtattcccgggcgtacttgacgatgatcgccgcgtacttgctgccgggcatgtcgggcatcgcgaagccggatgtccggtcggcggtcttcagcgccacggtcttctgcggcttctcggccttgacgaccttctgaaccctcttggtcttttgaactttcggagccttggccggggtgttttgagccgtccgggctttctccgtcttttgcgtcttgagtgtctgcgtcgtctctgtcgcttgcgctctattgccccattcgcctgcgtttgcgcaattgaatcccatcagcagtgtgctggcgcacaccacagcagaaataatctttctcatgtagtccagatactccaagcaaaagaaaagctgcgtattaatgaaatcctaacgcagcataaattcgcataaatactgactgtatcagcgacatttcttttctgtttcaattgacgacggtcgacaacacacgacaaaacaaccggcgccgtttagcgactggggttagaccatcgcattgaggagataatagggaaaacatgtggcagcgcagcaaacccgtaaaatctaggggtatatgccggcaaatcggcgcggtctcaggcgccgtagcgcggcagggccgatagcaggcgatgcagcgtgtcgatcgtcgagaaatcggcgatcccatcgaccctctccggcctgaaatggcgctggaaggcttcgatctcgccggccatcttgtcggagaattcgcctgtgatctcagtgccgtaaccgtagagcgacagcatcgactgcagggcctccaccggctgcccctggtcgccgcgctggaagaaccgtccgccggtgatcgaagccggcgcgacccagtggccgacccccttggcgtgcagcatttcccaggggaagttttcacccggatcgagcttgcgccgaggggcgacatcagagtgtccgagcactctttcgggcgcgattgaccaacgttcgccgcagtcgcgacacaattcgatcaccgcgtccatctgcgcctgcggatatgcgggcagcccgcccggatgtcccgcgttggcgatctcgatgccgatcgacgacgagttgatatcggtctcgccctgccagacgctcttgccggcgtgccacgcgcgccgcgcctcggcgacgagctgcacgacctcgccgttctcgcgcacgaagtaatggcacgagacctggctctcttcgcgacagagccagtcgagcgctccgtccgcggtcggcatgccggtataatggagaatgatcatgtcgggcttgcgcccgtcgacgcgctcgccatggttcggcgacggccgtacgccggctttggcgtaatctgccgtaaaggcggtcatgcggcgcggcgttccttctcgatcgcctcgtaggcggcattgagcgccgccatccgttcattggcaatcgcatggaactcggccggcacgccccgcgagatcagccggtcaggatgatgctcgctgacgaggccgtggtaacggcggcggatggtggtgaaatcgtcggacggcgaaacgccgagcaccttgtagggatcacgtccggtcgacacatgccgtgcggcgatctgctcgaagcgctcctcgctcatgtggaagatctcggccacatgcgccagaaacgccatttccctctcatggatgagaccgtcggccttggcgatgtgaaacaggccgtcgagcacctcttccagaaccgggcaattggcggcacaggtcacgcacagtacggaaagtcgctccgcataggcatcgtagcccgctacgtcctggcgcgcgagattatagagacgcgcgacgttggcggcctggtcgtcgggaaattcgaaaatctcgcggaaggcctggacctccttctcgctgacgatcccgtctgccttcgccatcttcgccgacagcgcgatgatcgcgaccgagaaggccaccttgcgccgcgtctctggatcgccttcaaaaaccgtgcgaacagcctcgaccacggcggaaagcgcacttcccgcggcgttgcctatggcattcagcagtttttcccagaaggacatcggttttctcgtgcaataaaaggaaaaacaccttgaacaaataaaggttgcctttgcaagacggggattggccgcagggttgaaaacacctttcacaattcgacaatggtcgtgcgccggcgaaagatcggcgcggcgtaacggacagccggacgatttccacaaccgcatgcgaacggcggtcgcggcctgaaacgattagatcgacgcttcacgacgacttgtccgtttggccgagccgaaacacgcatttttcacagaaacaacactttacacactccgctctctgccgcatccatgcaggaccgaaccaggcttagacacggatagcggaggcaccaatggccaagaaaaaagtcgcaatgctcacggcgggaggcctcgcgccttgcctttcttcggccgtcggcggactgatcgaacgctacaccgatatcgctcccgagcttgaactgatcgcctaccgctccggctaccagggcgtgcttctcggcgacagcatcggcatcacgcctgagatgcgcgagaaggcgcatctcttgcatcgctacggcggctcgccgatcggcaacagccgcgtcaagctcaccaacgctgccgactgcgtcaagcgcggcctcgtcaaggaaggcgacaacccgctgagggtcgcggccgagcgcctggccaatgacggcatcagcattctccacaccatcggcggcgacgacaccaacacgaccgcggccgacctcgcggcctatctcgccgccaacggctacgatcttacggtggtgggcctgccgaagacggtcgacaacgacgtcgttccgatccgccagtcgctcggcgcctggacggccgccgaagtcggcgcgcatttcttcgacaatgtcagcaacgagcagaccgccgcgccgcgcaccttgatcatccacgaggtgatgggccgccactgcggctggctgacggcggccaccgcccgcgcctatctgacgcgcaccaggaacaaccagtatgtcgacggcatgatgaccaatgccggcatgaagagcatcgacgccgtctatctccccgaaacacgcttcgacctcgacgcggaatcggcgcggttgaaggagatcatggaccgcaccggccacgcgaccgtcttcgtctcggaaggcgcctgcctggacgccatcgtcgccgagcgtgaggcagcgggcgagacgatcaagcgcgacgccttcggccacgtgaagatcgacacgatcaatgtcggcggctggttccagaagcagttcgcgagcctgttgaacgccgagcgctcgctggtgcagaaatccggctacttcgcccgctccgcccccgccaacggcgacgacctgcgcctgatccagagcatgacggatctcgccgtcgagagcgccctcaacaaggtgtcgggtgtcaccggccatgacgaaggccagaacggcaagctgcgcaccatcgaattcccccgcatcaagggcggcaaggctttcgacacgtcggtcaagtggttcggcgaagtcatggacgagattggccagaaatacgaagacgcatgattgacgcaggcaagatatgatgtctttgcttgttctctaatgaatgaggaggagattccatgtcgctcgaagcttggctggcatttgctgcagcatcggcaatcatgctggctatcccagggccgacgattctcctcgtcgtatcttatgcgctcggccacggccgcaagacggcctttgcgaccgtcagcggcgtggcgctcggcgacttcaccgcgatgacggcgtcgctcttcggcctcggcgcgctgctggcgacgtcggcgacgctgttcacgatcctgaaattcatcggcggcgcctatctcatctggcttggcatcaagctctggcgggcgccggtcattgcgggaccgatggccgacaatgacaacctgcccgaggaaagatcgctgaagatcttcctccacgcctatgtggtgaccgcgctcaacccgaagagcatcgtgttcttcgtggccttcgtgccgcagttcctcgatccggcgcgcccgttcctcgaacagatgctgatcatggaggcgaccttcctcgttttggcgaccatcaacgcctccacctacgcccttgccgcgcacgccgcgcgcggcctgattcgcaaggccgccgtgcagcgcgcggtcaatcgcacgggcggcaccctgctgatcgcagccggcgccgtgaccgccggataccgccgtatcgctgcctgaagtcatcgatcaccgcgggcgttgaaccgaagaaattttccatgggttgccgcaaagcaacgaataggttaattggcaattcagggcttaaggtttttggtaacttttaacgctgccggggcggcgcgtttcacgaaagtgagagtatggcagcggtcgctttttccgggttgaagcgcaatctcatcgtgtccacgatgctgtgtttcgttgtcgccgggtgcacgagcgtcgaatacacgtcccaggcggatctgatggccgaacaggtcgtcgttcccacccccaagcccggtgaggacgcgatgttcgcggccattcccgcgggcgaaggcctgccgcagacgcagatgatcgccggtgccgaccagaccgctccgtcacttgccaccgcggccatgccgacagtcgacacgacgcagcaggccgcgcagttgcagcctgtagcttacggccagatcccgctgacgcccgagatgaccgcgatccagtccgtggtgccgacgccacggccgggaaccgcaccgacggagcttgccttcgcggccagcccgcagaacaacgccgtcgcggcgctttcggcgatcgacgcccggccgcagtcgatgatggattacggtttcgacacgtcgggcccgatggacccgccgaccgcgccgccgatgtacagcgacagcgatgacgacggcgcccccaccgtccagaaaagcgaaatcaccaagatcatcgaaaaatactcgcagatctacaaggttccggcctcgctgcttcaccgcgtcgttcgccgcgaaagccgctacgatcccaaggcctacaacaagcgcggctatttcggcctgatgcagatcaagtacaacacggcgagatcgatgggttacgacggtgcgcccgaaggcctcttcgacgccgaaaccaacgtcaagtacgccgcgaaatacctgcagggcgcatggctggtctcggacagcagcgaagacgacgccgtcaagctctatgcccggggctactattacgatgccaagcgcaagggcatggacgacatcgcccagggcaactactaagcctcgcgaccctatggagcgggctcggcggatgccgatctcgtcggcggcggcagcctctccaatatatccttcaacagcatttccggccggtagcgcagccagcttggcgtcaggccgagcctgaccatgacgagattggccgacggcacgatcgccatgctctggccgtcatgcccttccagccagaaggcgtcggccggaatgccggtctcctcgctgctgccgttgcccggcgggcgaagccaggcctgaccgcgtgaataggcgccgcccgaggatgccgtcggcgtgcgcatcatgctcatgaagctttccggcagcagccgctcgccgttccagaccccatcctgcaacaggaactgcccgaagcggacccagtcgcgcgccgtcgcgtagagataggaactgccggcgaaggtgccgcgcgcatccacctcgaaaaccgcgctggacatgccgagcggatcgaacagcgcggttctcggatagtcgatcgcctgtttctcgtcgtccaggcgatccatccagatgcgcgagatcagcaccgaggtgccgctggaatagttgaactgcgttcccggatcgtcgtccagatcaaggcttgccggcagcgccgtctggtcggcgtccagatagagcatgcgcgtgacgtcggccaccgtgccatagtcctcgttgaaccgaaggccgctctccatgccgagcaactgcccaagggtgatctgtgaacgcctgtcgtcgcgccattgcggaaagagcccggcatcgtcggcgccgatcttgccttcaagcatcagccgtccggcgatcgccgcattgaccgtcttcgtcatcgaccagccgatcaggggcgtttgcgggccgaacccttttccatagcgctcggcgacgatcttgccgtcgtgcacgaccacgacggcacgcatgttctcaccggtcaaccccgggtccgaaagcagcgccgcgataccggcgtcgttttcgatcggcagcaccgccccctcccgtggcggcttggaggcgatgggctcgggcaccgactgccgcgcggcggcgaaatcgccatccggtacagccgtgcaaccgagaccatcgcggtagatcgcgtagttggcggcaaacagcccgagcatgcgcgccgtcacctgcttctgggcctcatcgacgcgaacccggatcagcctgagcagcggattgcccggcgcctgcacgtcttcggccagcacggtgttggcatcgcgccccgccaggaagacattcgagcacacgattttcgccgcatagccatcgccgatccgcagcagctccggcggcctgacatacaaccagcccgcgccggcgacgacgatcacggcaatcccggccgccaacggcttcaagatgcgcagaacgcgtcccatgagcacccctcccaacctttcacagaaggaagaaaattgccgccgggaaagccgcgtcaagtcctctgcctgtccaattcctgtgggcggctaccgccgtggccgcccacaggcgacgtcatcaaactgtattggcgccgcgttaaacgccctgaacgccaaatgttgagagactcacttatgacggaatttgcaccggatgccggcttccgcaagaaccggaaactcaaggcagctcttctccgccacaaggccttttccaaagacggactgtccgagcgccttttcggactgctcttttccggcctcgtctatccgcagatctgggaagaccccgatctcgacatgcaggcgatggaacttcagccccatcaccgcatcgtcacgatcggttccggcggctgcaacatgctggcctatctctcgcagagcccggcttcgatcgacgtcgtcgatctcaacccgcaccacatcgcgctcaacaggctgaagctcgccgccttcaggcaccttcccgcccatgccgatctcgtgcgcttcctggcaaggccgaaccagacgaccaacagccaggccttcgaccgcttcctgtcgaccaatctggacgaggcgacgagcagttactggaacggccgcaagttcggccgccgccgcgtcaccgtcttcgaccgcaacatctacaagaccggcctgctcggccgcttcatcggcgcggcccatcttctcgcccgcgtccacggcatcgacctcacggacatcgccagggcgaagacgctcgaagagcagcgccggctcttcgacacaaggatcgcccccctgttcgaaaagccggtggtgcgctggatcaccggccgcaagagctcgctcttcggcctcggcatcccgccgcagcaatatgacgagctcgccagcctcgcccccgacaactcgatcgcgccggtcctgcgccatcgcctggaaaagctcacctgccatttcccgatgcaggaaaactacttcgcctggcaggccttcgcccgccgctatgccgatgaaggcgaaggtccgctgccgacctacctgaaggccgagcactacgaggcgatccgcgccaatgtcgatcgcgtcagcgtccatcacgcaagcttcaccgagctcctggccggcgaaccggccgcctcgcgtgaccgctacatcctgctcgacgcgcaggactggatgaccgaccagcagctgaacgacgtctggtcggaaataacgcgcaccgcccgcgacggcgcccgcgtcatcttccgcaccgcggccgaaaagagcatcatcgaaggtcgcctgtcgtcggccatccgcgaccagtggacctatctcgaggatcgctcgctcgaattgaccgcgctcgaccgctcggcgatctacggcggcttccacatctatgtgaaaaagccttgaggccgacggacatgagcccaatggatatgaaccagtcgaccgcccccgcgcatgaccatgccgagctcatggacggcatgtatcgttaccagcggcatatctacgacctgacgcgcaaatactatctcctcggccgcgaccagacgatccgcaatctcgacatcggcaagggcgccacgctgctcgaagtcggctgcggcaccggtcgcaacctggcccttgcccaccggcactacccgcaggccaggctctacggcctcgacatctcccaggaaatgctgatctccgcccgcaagaccttcgccggtctgaagacatcggccgatttccgtgtcgccgacgccaccgccttcgacgcccgcgatttcggcgtcgacggtttcgaccgcgtgatgatctcctatgcgctgtcgatgatccccgattgggagcgcgcgatcgatgcctcgctcgcggcacttgcccccggcggccagctgcacatcgtcgatttcggccagcaggaagggcttccggcctggtttcggtcgctcctgcgctcctggctcgccaagttccacgtcacgccgcgcgcgacgctgcgcgacgtcctgcaggcccgggcggaccgccaaaacgcccggctgatcttcaagacgatcggccgcggctatgcctggcgcgcggtaataattaaggccagctaatatttggcttgaaactaaccgattttttacgttgatatggtaaacggagagcgcatctaaccgctggcacgtcaattcgaaggtcacgctgtggggcaagaagatcattcggttcacgacggaacacctatgcgccggctcctgctttgcctattgcccctggccctcatgctcgccggctgcacctcgtcctacgactatctcactaccgcctccataaatccgaagatgcgtttccaggacaccgatccgcaggatttcggtccgaagaagccgcagatgaacgccattcacggcatcgacatctccaagtggcagggcgacatcgattggcaggcggtgcgcaagtccggggtcgccttcgccttcatcaaggcgaccgagggcaaggatcgcatcgatccgcgtttcaacgaatactggcagcaggcccgccaggtcggcattccctacgctccctatcatttctactatttctgctcgtcggccgacgaacaggcggactggttcatcaacaacgtgccgaaggaagccagccggcttccgcctgtcatcgacgtcgagtggaacggtgaatcgaagacctgccgtacccggcccgatgcgcagaccgtgcgctcggagatgaagcgcttcatggacaggatcgaggcctattacggcaagcggccgatcatctacacctcggtcgatttccatcgcgaaaatctcgacggctatttccaggactataatttctgggtccgttccacggcgaagcacccggaagtcacctacgccaaccgtcgctggaccttctggcagtacacctcgaccggcgtcatccccggcatcaagggtcccgctgacattaacgtgttctccggttcagagaagaactggaataactgggtcgcgtctgtatccaaggataggaattcttagtaacgtcccgttttctttcttgcttctgtcacaatcatttgggacatcgacagcaattcaagcactgacgaggatacactccatgcaccgcacgcctgcaagccgttctgcgctcgctctcctccttgccgccggtctggcgaccggcgcggcagcgcaaacaccggccccggccgcaccggcggcgcaggccccggcgacggcagcagcacccgccgccgcctgcgacggcgatctctcgaccttccttgccggcgtcaaggctgaggcgatcgccgccggcgccgccgccgaagccgccgaccaggcgctcgcgggtgccgagatcgacccgaaggtgctgagccgcgaccgcgcccagggcgtcttcaggcagaccttcctcgaattctcgcagcgcaccgtcagccaggcgcgcctcgacatcggccgccagaagatgaaggatctggccgacgtcttcgcccgcgccgagcaggagttcggcgtaccggcgggcgtcatcaccgccttctgggcgatggagaccgatttcggcgccgtgcagggcgatttcaacacccgcaacgcgctcgtcacgctcgcccgcgattgccgccgtccggagcttttccggccgcagctgatcgcgctgatcgagatggtccagcgcggcgacctcgacccgcagaccaacaccggcgcatgggccggcgaaatcggccaggtgcagatgctgccgcgcgacatcatcgcctacggcatggacggcgatggcgacggccatgtgcgcctgaagcagagcggccccgacgccatcctgaccgccgccaagttcatccagaaactcggcttccagaagggccagccctggctgcaggaagtcaccatcccgcaggacctgcccttcgagaagtcgggcctcggcggcacgatgaccgcgggcgactggttcgcgctcggcgtcaagccgcgcaacggtgacacgagcttcggcacgctgcgcggcgatctcgtcctgccgcaggggcgcctcggaccggccttcatcgcctacccgaacttcgccatctatctcgagtggaacaagtccttcatctacacgacctcggcggcctatttcgcgacccgcctttccggcgccgagccctatctgaagggcacgccggaacagggcctcaccaacgaccagatgaaggaactgcagaccaagctcgacacgatgggccacgacgtcggcgccatcgacggcattcttggctccggcacccgcgtcgccatccagaagcagcagcagcggctcgggatgccggccgacggctgggcgacgccggccctgctgaacgcgctctgagcgctggcgagagagccaaagaccacgacacgagccgggccaagcgcccggctttttcgtttcgcgatttcgcaagcgttttcagcggcctgcgcgacgccgacaaaccgccacaggcgtaaacgggcagtcgccctattttacgttccgttaaaatgtgtgaatatttttccgaccgattttctcgttgagattcagcgaagtagcttttgtcaccggcaggagatgtgacattttcgccgcatcgcagcaaaaaaatcgctttccaaccgccacagtcccgacatattatcgccccgttaacgcgaggagacagacatgggactgacacgatccttgaatgtccttttgatcggtgcggcgtttcttttcgtgctgtcgatgcttttcatctgacactggatgccgcttcaaacggactatgccgatactcctagatagcgaagagttcatgaaatagagaaagcgcatgccaaccacggcatgcgctttttcagttctaaggactggcaacgtcgccttgatcaggcggcagcaccggcgctcttggcttcgttgcgcttgaagccgaggttcgtcaggaccgccgagaccagcggcgagcggttcatcgtgtagagatggaaatccgagatgccgcggcgggccagatcctcgatctgcgcggcggcgacatcggccgccaccttggcgcgctcttccggcttgtcgtcgtaaccctcgaaccgctcatcgagaaacgccggaatgacagtgccgcaggcaccggcgaagcgcttcagctgcgtgaggttcatgatcggcatgatgccgggcacgacggggatggtgatcccggccgccctgaccttttccaggtagcgctcgaaattgtcgttgtcgaagaagaactgcgtcagcgcccgatcggcgccgttgtcggccttgcgcttcagcatgtcgatatcggccgccacgtcgcggctttccggatgcttttccggataggccgaaaccgagatctcgaaatcgccgagttcgcgcagcccggcgaccagctcggaagcgttggcgtatccgccaggatgcggcgtatagggcgcgccgacgccatcgggtgtgtcgccgcgcagcgccacgaagtgcttcacgccggccttgcggaagctctcgacgacgctgtgcgtctcttccttggtggcgcccacgcaggtgaggtgcgaggcggtggcaagcggcgtggagctgatgaagcgcgacacggtcgccagcgtcggcgccttggtcgtaccgccggcgccgtaggtcaccgacacgaagtcggggttccagtcctgcagctcgctgaccgccttccacagctggccctcggcctcttccgacttgggcggaaagaactcgaacgagatgccgatcctgttgcgcgcgtcctggttcaaagccatgtcagtctctcccggcaaatgtgggtacggcgtgatcgctctcggcggaggccatcaggcgcctggggtcgcgcgcgagccagatggtgaccgtaagcccctgcccgctcccgtgccccggatgaagatcgacgacctgctcgatatcgagccccgccttgcgcagccagtcggtcatcgactggtgcgagaagccgaggcgcacatgcgcgtggtcgtcacgaagatattccagcgtgtgaggcgccagatcgatgatgacgagccgtccgcccgggcgcagcatgcgtgccgcttccccaatggcgatttccggctggtcgaagaagtgcagcacctgatggatcgtcaccaggtcgaaatcctgcgcctcgaaaggcaggttcaggatatcggcatggcgcaccgatgccttggtgatgcccgtacggtcgagattggcgcgcgccacgctcagcatgtcgcggctggcatcgacgccgatcgcgcggcggtagagccccgacagaagctcgaggatgcggccggtgccggttccaagatcgagcagcgaatcgatcggctggttgccgagcaggcggatgacggcggcgtcgacctcctcgtcggccgcatgcaggcggcgaagctcgtcccactcggcggcgttgcggctgaaataggcctgcgcccgctccgagcgctgccgcttgaccgcatcgagccgctcgccgtcgcgcaggatgacaggatcgttctcggatgcatgcgccagaagattgcgcacgaagctcgccgccttcccctcctgccgcagccggaaataggcccaggcgccctcctggtaacgatcgatgagatcggcttcgccaagcagcttgagatgacgcgagatacgcggttgggattggccgagaatttcggtaagatcggtcacggtcacgtcgccggcggccagcagcgccagaagacgtaagcgcgtcggctcgcccgccgcccgcagcacgtccaccaacgcatccaaacctagcctgacgggttcacccatatccgatccaatcaacatataaagatatctttatgtgaaatgatttggtcgtgcaagcgcgatttcgatcggttcacgaaattcactaggcaaatcgcgacatgagggtcccacaaaaaagccccggcgaaccggggctttttcactggtcactcttcttgagcaaaccttagcgcgtcaggcgcttgtaggcctggctgcccgggttcagcgcgtcgggaccgaggcggcgaaccttgtcttcttcgtagtcctcgaagttgccttcgaaccattcgacatggccgtcgccttcaaacgcgaggatatgcgtcgccagacggtcgaggaacatgcgatcgtggctgatgatgatggcgcagccggcgaaggcttcgagcgcgctttccagcgcacccagcgtttccgtatcgaggtcgttggtcggttcgtcgaggaggagaacgttgccgccggccttcagcatcttggcgaggtgaacgcggttgcgctgaccacccgagagattgccgaccttctgctgctggtcgccgcccttgaagttgaaggcgccgcaataggctctggagttcatgtcgaacttgccgagcttgatgacttcggcgccgcccgagatttcttcccacacggtcttgttgccgtcgagcgcatcgcggctctggtcgacatagccaagatgaacggtatcaccgatgcggatcgaaccggcatccggcttttcctggccggtgatcatcttgaacagcgtcgacttgccggcgccgttggggccgatgatgccgacgataccgcccggcggcagcttgatcgacagatcgttgatcagcgtgcggccttcgaagcccttgttgatgccttcgagctcgatgaccacctggccgagacgctcggaaaccgggatgatgatctgcgcatcgccggggcggatgttttcggccgcatcgaccagctgttcgtaggccttgatacgggccttcgacttggcctgacgcgccttcgggctggaggcgatccattcctgctcgcgcgacagcgccttctggcggccggcttcttcacgggcttcctgctgcatgcgcttggccttcgcctgcagataggcggagtagttgccctcgtaaggaatgccgcggccgcggtcgagctcgagaatccagcccgtgacgttgtcgaggaagtagcgatcgtgggtaatcatcatcacggcgcccggataatcgcgcaggtgcttttcaagccaggcgatcgtttcggcgtcgaggtggttggtcggttcgtcgagcagcagcaggtccggctgcgaaagcagcaggcggcagagcgcgatacggcgacgctcaccacccgaaagcagcgtgacgtcggcatccttcggcgggcagcgcagtgcttccatcgccatctcgacctgctgttcgaggtcccagaggttctggctgtcgatgatgtcctggagcttggcgccttcgtcggcggtctcgtccgaatagttcatcatcagttcgttgtagcggtcgagcacggcctgcttgtcggccacgccttccataacgttttcgaaggcgttcttggacggatcgagatgcggctcctgctcgagatagccgacggtagcaccttcggcgagccacgcttccccggtgaactccttgtcctggccggcgatgatgcgcagcacggtcgacttaccggcgccgttcgggccgaggataccgatcttggcatcggggtagaacgacaggttgacgttttcgaggatcttcttggcgccgtaggacttgttcagtcccgacatgtggtagatgaactgacgtgccatcggtaattctgctccgggggaaattggtttgccgctatgtaggcgaattggcgcccgggagcaacgcgcctatggcaaaatccaatcgctttgtcgcatatcacccgccctttgcagctgaaaatcagcccgcgttaccgcaaggcggcatgatcgatccggaaaagctgaaaatcgctgcgcgtgggtggattgatccgctccagtcccggccagccatccccgcgcgccagcgcggcataaagcggcgcctgcgccggatcagcttccaggggaaagcggcagacggcaacataatcgaacggtgcgagcgcttctcggcgcaactgcgggtccgaggtcatgaacgcctggaacatccgcttcatgccgggtgacgcccgatggaacggaatcgcaccaaccgaaaagcccgttggcgccgccaggagaagaggcattgcaatcccctgcggtgtcgcaacgcgccccggcgggacggcttggagcacggagaaatcctgtcgctcgcattcgctcgccgtcatgtagtcgacctcgtcgaacttgtgcgcaactggcggcaacagcacgaagaagagacaaagcgcggcggcaacagcggtcgtcgcgaccgcggaaagccgataggccttgtcgaaagccggcaacttcatcgtcatcgtcgcaatggcggcgggcaggaaaaccggcatcagcgcgatcggaaagcgaatgttgcgcgtcacgaaagcggtgaggatgagggcgcccaacgccatcagatagccgatgagaggtccaaacgaccgcgtctgcatcctgaaccggaccagcggaccggcataggcgccaacggcagccgtcaatgcgagaagcagcaacagatcatattggccgttctcgtagaaatagcggatgctcttttcctgccaaacacggttgaaccacagctcgcgcgacagcgggtcgatgatgccgtacggccccgaaatgcaggatgggaagaggaaggcggccgcgatcagaacggcgccggccggaaccgccaatgtcagtagccgcatgacagggccagcacgatcactctggatcgccacacatgcgccgagaatggcggaaaatcctgacagcaggaaaatatagggagccgagaaggcatcgcactgcgtcgaaacggcagcggcaggcccgaggaaggcgatggcggacacaagcgtcacggtcgccatggagacggacgacgcaatgatgacagtgcgaacccccgcgacattgccgatgtagcaaaggacgagcccgccataggcgatggcgatgaaaggcaggcattcaaggccgaccaccgtcgagatcgccgcgcccgctccaatcatcagcccgccagcccgatcccatcgcacgagcccggcgatgatcatcatgagcgcaacgatctgcatgttatgatgatcgatgcgaccaggtgaaaactccagcacacccatgctcatcagcacggtcgcaagcatcagcgataccgtgagtgccgttcccgtcagcgaaaaccccgcaagcagacgccgtgctgtcgcagccaccagcagacagcagaccgcgagcagcatcggcggccacagctgaaaggcaacggaaagcccctgcgaaggggccatgaaaggctgcagcagccaggcaatcgccacataagggagatcgaccaggcgcgaccagggcgacacgtaggtcgccggcatcgagatgaatggcagcgaaagatcgaaccaactcccctgcgcggacatcaggtgccggatctggagttcgcgcaactgatcgtcgatatcgccgacgaaccttatgccatcagcgagatcgaccaacacgatcgccaaggcggtggcataaacgaccagaaacattcgccacaatgtcatctcgcctgcagcagcctgatcgctttcacatgcaaccacatcggacatcggtcgtcactcatgctgtttgtcaccgtcagcccccatgatagacgccaaaaattgagattatgctacggcctcaaaaccccgcagcgtcgacgatcccctcgttgcaaccgaacgatgtcttgcctgctccctggatgagatcgccgagatccctggccttgccatccgtcgtatcggcggaaaggccgatcgtcagttcgctgatgacgcggctgccgccggacctgcggcagctcatcttcacccggtcgccggcgccgggaccgaagctcttgtcgaacgccgccctgatcgcgtccccggtcagtgactttccgatattggcggcgaacagctgctggaccgccgatccgttcaggtcctcgatcagcctgacggcatcggcgaaataggcgtcggcgctcatgccgctgcaggtgccgtgctttatccattcatgccgctccagcgccgattgcgtccccggcatgaccctgtcgagcgacgccctcgtctcgggtgaaagcgtcacttccggcagctgcttccagccgccattcttgtcggccgattgctgcgcatcgggcacgccgcagtaattcttgcgcatcggccagaggccgtgcagtgcgaaattgctggcgtcgtaacggtcgccgccctggctggcgcattccggcttgcgctggttggtctggcagaaggccggctgccagctcgccgcgaggatgaagcgcgtgcgccccaagccctcctgggcaagcgccccaccggccatgatcgtcaggaagaacaatgcaacgacacgcgaaagagacttgcccatatccatccccagaaagaacaattcatgaacatcaaagcatgcggcgcctgttccggcaagcggcaaaacgcgacgcgcgaaaatctccggcacaacccgccgcgcctgttgcatttgaccgctgttctggtcttctcccgccacggaggaaatcatgttttcagacacaaggcgcctcgaccatgcgggcgcttcactggcctatcattatcagccggccgaaggcaccgagcgcggcatcctgctggtcagccacggattggccgagcattcgaaacgctaccagcgctttgcgcaagcgattgccgcacgcggctaccacgtctatgcgcatgaccaccgcggacacggcgagaccaccgcgccggacgcgccgatcggcctcttcgcaaggcgcgatggcgccagccgcgtcatcgacgatatcgaggcgatgcgcgacgaagccgcgaccgagcaccccggtctgccggtcattctcttcggccattccatgggcgggctgatcgcgctcaatgccgcggtcacctatccgcgaaaattcgatgccgtcgccgtctggaactcgaatttcaaccccggcctcgccggccgcgccgcgcaggcgatcctcttgaccgagcgcgcgctgaaaggctcagacgtcccgagcgacctgctgccgaagctgaccttcgcgacctgggcgaaatcggtccccaaccgccgcacggatttcgactggctgtcgcgcgaccccgaggaggtcgacaaatacgtggccgatccgctgtgcggcttcggcgcatccgtttcgctctggctggacattttcgagttgacattccgggccccgcgaagggaatatctcgcacgcctgccgaccgagacgccgatgcatctggtcggtggcggccaggacccggcgacggaaaacggcaaggccatcctctggctgtcggatcatctgaagacgcatggcttctcccgtatcagcaccgaaatatatccggacatgcgccacgagaccttgaacgaggtcggcgccgacgccgccatatcggcattcgccgactggtgcgaccgggtcaccaccgccgcttgagcggcatcccccgcctctaccttgaaatcagagaattccgtcatgagcagcaacgcggcaaccggcaccggcaacacgtcatcggaagtgatgatggggctgatcctgatgttcgtttcggtgctcctgtcgcccctcatcgacattttctccaagctcgcgatcaccacgatcccgtccgccgagatcaccgccgcgcgcttcgccgtgcaggcgctatgcatgttgcccatcgttctgtggcgtcgcaacctcaccgacatcacctggaggcagagctttttccacgccatccgtggcgccatcatcaccgtctcgatgatctccttcgtcaccacgctgaaatacatggcggtcgccgatgccatcgccattttcttcgtcgagccgatcatcctgacgatcctcagcagcatcttcctcaaggaaaagatcggctggcgccgctataccgcctgcggcgtcggcttcttcggcgcgatcctgatcatccagccgagcttccaggaggtcggttacgtcgcgctgctgcccgtcgtcagcgccgtctgcatcgccatatcggcgatgatgaaccgggcgctggcgcagcgcgaggacccctgggtcatgcagttccacatgggcctctggggcctgctgatctgcgccatccttctccatctcggccacggcagcggctccgacgtgctcgatcccgtcatgccggatgcccgcgcctggctctatctgctgggcgtcggcgtcaccgccgcgatcgccggcatcttcggcgtctacgcctatcgcgcggcgcccgcctcgacgctggccccgctgcaatatttcgagatcgtctctgccaccgccttcgcctggctggtcttcggcgatttcccgaacgcgctgaaatggctcggcatatccatcatcatgggctccggcttctacatcatctggcgcgagcggagctttgcatccaggcccgtatccgatacatctggggagacgcgggcaccctgatctgatcgtgggaggaacatgacgcagacccagcctaacaaagcgccgctcgcgggcatccgtgtcatcgagctcgcgcgcgtgcttgccggtccctgggcaggccagatgctggccgatctcggcgccgacgtgatcaaggtcgaaaaccccgagggcggcgacgatacaaggcactggggtccccccttcgtcgaaggcgccgatggcgagaacctctcggccgcctactaccattccgccaatcgcggcaagcgctcgatcacagccgatctgcgcagcgacgaaggccaggcgctggtccgccggctggtcgcgaccgccgatgtcgtcatcgagaacttcaagctcggcggcctcgtcaaatacgggctcgattacgagagcctgcgcaagatcaatccgaagctcgtctactgctcgatcaccggcttcggccagacgggaccctatgcgagcctcgccggctacgactacatcgtccagggcatgtcgggtttcatgtcgataacaggcgaacccgacggacagccgatgaaggcgggcgttgccatcgccgacatcttcacgggcatctacgcggtctcggcgatagaggcggccctcatccacgcgctgaagaccggtgaaggccagctggtcgacatggcgcttctcgacgtgcagtcggccgtgctcgccaaccagaacatgaactacctggtatccggccgcccgccgacacgcctcggcaacgcccaccccaacatctcgccctacgaagtcgtcccgaccgccgacggctacctgatccttgccatcggcaatgacggccagttccgccggctctcagccatccttgggcttacaggtatcgccgacgacgagcgcttcgccaccaacaaggcacgcgtcgccaatcgcgacgaggtccggcggctggtctcgaccgagacgctcaaatgggcgaaggttgatctcttgaaagcctgcgaagcgaacgcggtcccgtcgggcgcgatcaacaccatcgaggacatgttcaacgatccgcagatcgtcgcgcgcggcctgcgcgtcgatctcgaagatagcgccggcactgtcattcccggcgtccgaacgccggtcgtcctgtcgcggacgccgctgcgctacgaaagacccagtccaagactgggcgagcaccaggaggaggtgctggccgaactcatccaatgggaggggaaaaaatgaaacggacgggcggagaactgatcgtcgaggcattgaaggcaaacggggtgaaacgcctctcctgcgttcccggcgagagtttcctcgccgtcctcgacgcgctccacgacagcgacatcgaggtcgtcgtctgccgccaggagggtggcgccgcgatgatggccgatgcctgggggcgcctcaccggcgagcccggtatctgcatggtcacccgtggtcccggtgccgccaacgccaccgcgggcctgcacatatcaaggcaggattcggtcccgatgatcctcttcatcggccaggtccagcgcgacgcccgcgaacgcgaagccttccaggaggtcgagttccgccgcgcgctgaccgaatacgcgaaatgggtgggcgagatcgacgacgcggcccgcattcccgaattcgtcacccgcgccttcgcgctcgccacctccggacgccccggccccgtcgtcctgtcactgcccgaggacatgctgcgcgacatggtcgaggcaccccgcgccaagcgctacgcccgcgtcgaagcccatccgggccgcagccaggtcgacgacgtctatctccgcctgctcaaggccgagcgccccatgatcattctcggcggttcgcgctgggatgccgatgcggtggccgacttcaggaccttcgccgagcgcttcagacttcccgtcggctgctccttccgccgccagatgctgttcgacaatctgcacgaaagctatgccggcgatgtcggcatcggcatcaatcccgaactggcgcgcgagatcagggaaagcgacctgctgatcctgctcggctgccgcatgtcggaaatgccgtcctcgggctatacgctgattgatatcccctacccgcagcaacagctcgtccacatccatcccgatccgtcggagctcggtcgcatctaccgcccggatcttgcgattacggccagcccgcaggatttcgtcgccgcgctcgccgatctcgaagcccccgccgaagcgcgatgggccgatcgcacccagcgcatgcatcaatcctatctcgcatggtcgacaccgccgcgtacaggaccgggcgaggtccatatgggcccgatcatggcgtggctcgaggagaatacgcggccggacaccgttttcaccaacggcgccggcaactacgcgacctggctgcaccgctaccaccgcttccggcagttcaacacccaggcggcgccgacctcgggctcgatgggctacggcctgcccgccgccgtcgcggctgggcacctgtttcccgatcgcgaggtgatctgctttgccggcgatggctgcttcctgatgcacggccaggaattcgccaccgccatccgctaccggctgccgatcatcgtgctcgtgatcaacaacggcatgtacggcacgatccgcatgcaccaggagcgcgaatatccgggccgcgtcagcggcaccggccttaccaaccccgatttcgcagcgcttgcccgcgcctatggcggccatggcgaaaccgtggagaaaaccggggacttcgcccccgccttcgagcgcgcgcgccaaagcggcctgcccgcgatcatcgagatcaagctcgaccccgaggcgatcacgccgacgcgcacgctttcggacatcgcgcaaacaaaaagccggtgagcagttcacatgctcaccggcttttcaaatcgcgataggaacgatcttagatcgcggccgtgacgatgaattcgaccttgtacttcggcgcggccagcttggcttcgctggtggcgcgagccggcgtgttggccggatcgacccaggcttcccaggcggcgttcatttcagcgaagtccgagatgtcggagaggtagatcagcgtctgcaggatcttcgacttgtcggagccggcagcggccagcaggcgatcgacttcggcaagcgcgtccttgcactgctcggtcacggttgcgccttcgccaacctggccggcgaggtaaacggtgttgccgtggatgaccgcgccgctcatgcgggcgccaacgtcgatacgcttgatgctcatgatattctccttgtcatggctgaaaaggcgccgcgcaagcgctggcgccggactggcattccgcgccttgaatcaggtgcggatgtggtgggtcttctggtagatcgccgtcgagcgggcgccggagcggcaatagccgagcatcgggcgcggaaactcgtcaagcgcatcgaccatgccggcgaccgcctcttccgtcacgcccatcgggccgacgggaacgtgggcgatctcgagaccgagttccttggcccgcgccgcgatatcggcgaacggcgtctggtccatgctttcctggtccggacgatggcagacgatggacttgaagcccatggccttgatctcgtcgagctcatcgaccgtgatctggccggaaaccgaatattcgtcgtcgatctggcggatgtccatcgcaaatactcctgaaatcgtgggctgaatgactacgccgcccgatcaatgccgtcaaccgcacaacacggttgaatcggcctgttgaattgcctgtcaaacgaaagcgaagttgagcccgtactcgcagctttcgccgggcttcagcatgacgaattcgcctgcctcctcgagttcggcgcgcggcacccagcggtgcgagaccggttcgatgccgagcacgtcggccggcgccgtctggttgcgccagacctgcagatgcggcagcgtgtcggctttcacgcgcacccgcagcgtcttgccgccgactgcaaccatcggcccgagacgcacttccgccagcccatcgcgcgttgcgggcgcttcgacgcagaagatatcgccgccatccttgccgaaacgccaggggaagccgccattctcaagcatcgcgccttctaaccgcgtgccctcgtcgaaccatttgccgccgatgttcatatgatacatcaggaacgtcggcacggtctggtcgctggtgttgaccaccctgtctttcagatgcgcctcgccggtcttgccatccatgaaccagtggcgctcaatccgcgcaggcagcccctccacggtgacgatatcgatatcggcgcggcattccgcattgccgttttcgaacttcgtccaaagcaccttggcggcatggccggcggccgagccgtgcagcggaaagaccttgttgtcggaccggccggggatcggctcgcgatggcggatgtggtcgggcccgcaggtaaacaggaaaccctgaaccgaatgcgatatacgcgcatcgccgtcatcgggcacggctgccttcggcgcgatatcgatgccctcgaccacgcagccgccgatatccatcagcgacgtctcgtccagcatcagcttcggccccgtcgcggcggaaaattccatcatgatctcgtctccctcctctgcacgacgttagggttaggtgtcgcgcctgctttcgtcaatcttggctattgttgccgccaacgagaatttgattggaaccagctggctctctcaaatgtttatgagtaaagggaaattcatgcgtttttttatcttttgttcagcacgatttcataaattccacactagcgtcaaaattcgcgggtgtgtgtcgccaagtcactgaaggatacgaagacgtgaatcgctttctgaaatcggcattatctgggaccgttatcgtgctggccatgtcggccgcgatggacaatgcatccgcgcaacagtatcgccgtcagggcagcgtcgtcttcgtcacgccgaacggcgagatcctcgactacatgcctcaaggcagcggctacacgcgcgaccgcagcggcaaccgcgtgttggtcgatggctacggcaacatcatcgccacggaagcgcgtgcgcgcggctattatcccccgccgccttcgcgccaggtctacggccgggacgcctacaacaacgatccctattacagcgaagacccctacggcgacacgcgctattccgagcgcggcgcggtcacgggctccatcccgcgcgacgcctcgatcgatcgccagccgctggacaaccagccctatcctgagaacgagggcaactacgcatcgatcgagcctgatcagcagcagccccaggtcacgcagccgacccgtccggccgagcccgtcatcacgctcaagaacaagtcgaaatccgaaatcgtcgcgctgcaggtgttccttgaccgcgccggcacgtcgccgggcgccatcgacgggcgcatgggcgccaacgtcaccaaggccatctacgcctacgagcagatgaccggcgagaagctcgacccgaacaataccgatgcgatcctcgagcagctgcgcatgtccggcggcctgcctgtcgggacctacaccatcacccccgccgacgctgccggcccctacgtcgccgaaatccccgaggactacgccgtcaaggcgcagatgacctcgctcagcttcacctccaccagcgaggcgctggccgaacgtttccacatggacgaggcattcctcaaggaactcaatcccggcgtcgatttcaccgttcccggcacgatcatcaaggtcatcaatcccggcgaaccaaagaccagcagcgtcgcgcgcatcgttgccgacaaggccaagaagcaagtcttcgcctatgacgcatcggggaacctgatctccgcctacccggcatcgatcggctccaacgatacgccctcgccatccggcaccatgaaggtcgatcgcgtcgccttcaatcccggctatacatacaatccgaagatcaacttccagcagggtgccaacgacaaggtcctcaacatcccgccgggcccgaacggccccgtcggcaccatctggatcgccctgtcgaagccgacctatggtatccacggcacgcccgatccgtcgaagatcggccgcacccagagccacggctgcgtccgcctgaccaactgggacgcgaccgaattggccaagatggtcaagcccggcgtcgtcgtcgagttcctcgactgatccgaattagttgttgcggcgcgcctgttcgctgaaatagacgagccgcaacaattcggattgcgaattgacgcccgtcttcgcgaacaccgacttcagctgactgcggatcgtctcgcgcgaccggttgctctcgatggcgatatcggtgatcgacgatccgtgcagcaacccctgcatgatcttgatctccgccctggtcagcccgaattggccgccgagccgcgggacgtccatcgaaacgggcttggatgacggctcgatgatgatcgccaggctcggcgcgtcgaagaactggatgcgggcgctcttctggagccggatgagcgtcagcctctcgccatcgaccatgacgacctgctgccgctcgccatcgcgccaccgcgacaacagcctggcgaggcagtcatccgcgtccgtttcggcaaggcagaccctgccctgcaggtcaagacgcacagcatggccctcggccagcagccgttccccgacctcgttggccgaatccagcctgcctccgtcgccgacgagcaggacgccgaccccgatcgcatcgaacaatcgcccgcccatctcgtcgatgctcttctcactccgcccggcctcgaagtaacgcaccgccctgtggaggtgcggcgcgagccgggtcagcgtgtcggcgtagacgcggttgtcatccggctcgccgccggcgatcgaactcgagatgttgaacatctggccaccgcgcttcaccagcgccatcccgatggcggtttcgccgcactgcttccagaaatcgttgtagaattcggtgcggacgaacgcctcgcgcggcagcagttcctccgacaggaagccgcgccacatcggcatgacgctcatcgccggcgaccatgggttcacggccgcgaagtgatcggcgtagctttccacccattcctcactgaaacccttgtcgatctgcgaagcgccctgcgcccgcatcgggtcatggcagaagagcgtcgtccgcccgccgggaacgatctcgttccaccggcccagaaacatgtcccaggtcgcctcgccgaaaatgacaccgtagatggtgtcgaccaggctgtcataggtatcttcggcgacgatcattgttcccccggcaaacgcccgcaccgcaggcgaggataccagtgtaaaccttccggaaacaacgaaaattacccttttcgggtgatacccacctggcccgaaaacgggcagtgatgcgcatgtgcgcgatcgcatcgacacgggggaccgatcctgcgccaatgaaaatgcgccccagcggaccggggcgcattttcaatcacaaaatgagcgctcaggcagccgagcggatcagcgggccggtgatgcgcgccgccgcgggcaaccgcaccggcagcttgcgcatgatctcctcggcgaaacagagcgcgttttcgcgtgccttgtcgaggttgctggcgcgggccgggtcgagcgtatgcagcgtgccgccgcaatcgaagatatcgcggaaggcggagcgctcgatgatcgcggtgtcgagcaccggcacctgccgttcgttgagcagcgacttgacgataccgagcgcccgcgtcgtcaccatcgagttgacgcgcgtcagcacgacggagtgaccgatgcggatacccgccttctcgtcgagatactgcagcagctccagcacctgcgcgccgccgcgcgcatccatggcgcagccctggatcgggatcagcacgtggtcggaaagaccgatcgccgttgccagcatcggattgcgggcgcccggcaggtcgacgatgaagtaatcggtgttgtgcttgttctcggcgatatgctgcggcagcgacgccgaggtcacgaaatcgatcacggagacgttgggaacgtggccggagatttcatgccagcgcgaaatccagtgctgcggatcggcgtcgaggacggttacgcggtagcccttgcgggcaagctccgtggcaagaagaagaacagcggtggtctttccggctccgcccttggtgtttgcaaacgtgatgactgccatgttcggtcctcgaggggaaatatcgtgagccggaatcgctctcttgcgcacatcgggatgcatcgtgcggttactgcatcctttccaaacatggttaacaattgctaaacaaggcattcgaaatccgggtccgcatttcttgcagccgccgcgcgcattcaccctgaacgccctgccccagaacgaaaaaggcccgggaagcgacgtgctttccgggctaggtctcaggtccgcattttctatcagaagcagtccttgaacagcgccttggtgttttcgagcgtcatcgcgacagggtttccgccggcgctcgggtcctcgatcgccatggccgatagttcgtcgattcgatccggcttgatgcccatcgccgaaaggctctccggcacgccgaggtcggaacgcagcttcagcacgtagtcgtagaacccgtcgaagcccccggcgatgccgagataggccgccgcgcgcgcgatcttgtcttcgatgacagcgcggttgaaccgcagcaccgccggcataacgacggcgttggtcatgccgtgatgggtgttgtagacggcgccgatcggatgcgacagcgcgtggatggcacccagccctttctggaacgcgaccgcgcccatggccgcggccgacatcatgttcgcgcgcgcttcgagatccgtaccctccttgtaggcgcgcggcaggaactccttcaccagccgcatgccctcaagcgcgatgccggccgacatcgggtgatagaagggcgaggaataggcctccaggcaatgcgcgaaggcatccatgccggttccggcggtgatgatcttcggcatcccgaccgtcagttccggatcggcgatgacgacgccgggcaggaacttcggatggaagatgatcttcttcacatgcgtatcggaattggtgatgacgctggcgcgcccgacctccgaaccggtacccgccgtggtcggcacggccacgatgggcgcgatcccctcgatggaagcgcgcgtccaccagtcgccgatatcctcgaaatcccagaccggacgcgtctggccggccatgaaggccacgcacttgccgagatcgaggcccgagccgccgccaaaggcgatgacgccgtcatggccgccatccttgaacgccttgacgccggccgcgaggttcttctcgttcgggttcggatcgacatcggcgaagatcgcacgaccgagcccggcctcttcgaggatgtcgagcgcgttcgacgtgatcgccatcgaggccaggccgcgatcggtgatcaggagcggcttcttcatgccgaggctcttggcggcgtccgccagctccttgatgcggccgcggccgagcttgaatgaagtcgggtagctccagttggctgtgatatgcgcgctcatgctgtgactttcttcagatggtaggatttcggacgcgtcaggttctggaagccgatgatcgacagcgagccgccacggccggtttccttaacgccggtccagcaaagcgccggatccagataatcggcgcggttcatgaacacggtgccggtttcgatctcgcggccaagccgccctgcccgctccgcgtccctggtccagagcgaggccgtcagcccgtactggctgtcgttcatcagttcaagcgcctcgtcgtcgctcttcaccttcatgatgccgacggcgggaccgaaagtctcctcgcgcatgaaggccatggagtgatcgacattgacgaggatctgcggcgcgagataggcgtcgccgtcatcctgcgggaagagcttcggatcgaccagagccttggcgcccttcccgaccgcatcggcgatctgctcgcgcacgaccttggcgaaacgcttgttggccatcgggccgagcgacgtttccggatcaaggggattgccgagcttgtagttcgacacccaggcgacggacttctcgacgaagctgtcatagagcttttcatgcacataaatgcgctcgatcccgcagcagcactgcccggaattgtaggtcgcgccgtccatcagcgtatcgaccgccgcatcgagatcggcgtcctccatgacatagccggggtccttgccgccgagttcgaggccgagaccggtgaaggttccggccgccgcgcgctccatcgaacgcccgccttcgaccgaaccggtgaagttcacgaagttgaagctgccggcggcgatcagcgccgacgtcgtctcatggtcgagaaccacgttctggaacacgtcctcgggaacgccggcctcgacgaaggcctgcaccagccgctcgccgacgacaagcgtctgcgacgcatgcttcagcacaaccgtattgcccgccatcagagccggcgcgatcgtgttgatcgcggtcatgtagggatagttccacggcgccacgacgaagacgacgccatgcgcctcgcgctcgatgcggcgctcgaacttgtcgctttcttccacgaccagcggtgccagcgcatcggcggcgatcgaggcgacgtagttggagcgctcgttgaagcccttgtactcgccgccatagcggatcggtcggcccatctgccaggcaagctcgggaacgacgacgtcggacatctcgttcagccgcgcgacacccttcagcaccagctggacacggtcttccagcggccgccttgcccaggccttctgcgccttgcgcgcccgcgccacgacgtccttggccgcctccagcggcagcgccggacgctcggcgtaaaccgatccgtcgatcggcgatatgcattgaattacagtcatttccaagctccagtcattaacaggccagcgtgcggacatgtcccgcgacgccgtaggaaaggatcgcgcggtcgcgcgtgatgatcgtcaggtcgttctcccgcgccgtggcgatgagaatgcggtctgcgggatcgttgtgaacgggctgcggtagaaacgatgacgcgacaagcgcctgcagagaaacgtcggcggtctgcgcaccgataatgttgatagcgtcctcaaaccaagccatcgcatccttcgtcgttggcagcctccccttgcttatcaaaatcccaatctcccacgccgacatcgacgaaacaaacaggctgcgcttctcacgtccactactaagcgcaacgttcgcatctctgctcagtggcgctccctcaaccagccagagaaccgcgcaggtatcgatgaggaagcgttcagtcatcgtcgtagactttaccccaatccggatcggcaggcgcggtcagatcgacccccggcatgatggtcagcgtccccttcatgcacccccaggccgggtgcacctcgagcagcgtgccatcctccagttccatccagcgcttgccatccttgtagatgacgtcgtcctccgtaaacatcttgacgggcggctcgtccggcgcgaccggaccggtgttgccgctctcatagcccgcctgcttcttctcggcgaagccggcgacgacaccacgtcgatgcgccgccacttcctccagcgcaacgccgagataatcggcgatctggtcctgctcgtcggcgctcatcttccgctcgccgctcagcatgcgcgacaccgcgctcggatcaagccccatgaagcgggccatgtcgcgaagcgacgcgtcgcgttcggaaagcttctcgtagaaccatgcgctgtcgatcacacccatgtcgatctcctctggaaacgccggactacattagcacaatgcgaccagcgcaacaatcagagcgagtgttgcgattatctcatgcccgctcgaatccgcgcgccacctcccagtccgtgatccgccggtcatactcttcctgctcccactccgccgcacgggtatagtggtcgataacgtcgtcgccgaaggcattgcgcagcatcttggactttgtcatggccgtggtcgcggccctcagcgtgcgcgggatctctcgcaccttgcgcgcgccataggcgtcgccgacgaaggacgcttccagctccatcttgttctcgatcccgtcgatccccgccgccagcaatgcggcgaaggcgagataggggttgaggtcggaaccgccgacgcggcattcgatgcggatcgccttggtgccgtcgccgcacaggcgatagccggccgtgcggttgtccttgctccagatcgccttggtcggcgcgaaagtgccggccatgaagcgcttgtaggaattgatgtagggcgccaggaaataggtgatctcgctggcatgcgcgagcagcccggcgatatagttttccatcaggctggacatcccgtacttgcccttgtcgtcggcgaacagcggcgtcttgccatccgcgctccacaacgactggtggatatgcgacgagctgccggcggcgttgtagtgccacttggcgaggaaggtgatggccttgcccttggcccaggcgatttccttgcagccgttcttgatgatcgaatggcggtcggccatggcgagcgcatcggcgtagcgcacgttgatctcctcttggcccgccgaagcttcgcccttggagttctccacgggaatgccggcgccctgcagcccggtgcggatcgcccgcatcacctcttcctccttggtggtctggaagatgtggtagtcctcgttataggcgctggcgagcttgaggttgcgatagccggatgcctgagcggattcgtaggtctggtcgaacaggaagaactcgagttccgaggccatgaaggccttcatgcccatgtcttcgagccgcttgacctgcttcttcaggatcgcgcgcggcgaatgcggcacttcctcgtgggtgtgatgatcgagcaggtcgcagagcacgagtgccgttccctcgagccatggaatgcgccggagcgtcgagagatccggcttcatcgtgtagtcgccgtagcccttttcccagctggtcgccttgtagccggagacggtctccatctccatgtcggtggccaccagatagttgcagctgtgtgtttccttccaggcactttcgacgaagtactcggcctggaaacgcttgcccataagccgcccctgcatgtcgacctggcatgccagcacggtatcgatgcgtccgtcggcaacgtcctgcttcagatcgtcgagagtatagatgctcatatggacctccccataaatttagactgaaatcgggccaacgaaacggcatgcgccgtgcggcgatgccgcgccggactgcgcctggtctattgtcggtcaaccggaatgcggggtcgccggacgcggccccgctgttttgcaggaatgcctcagctttcgccgacagccttttcggcggccgcgatctccgcctggcggcgcgccacttcctcgccgatcggcggtcccttgaagcggcggctctcgaagccgaaccacacgatcgcggtcagcaccaggaagccgacggtgatgtagagcgcccactcgttcggcggctgcacgccgagaacgaagatcaggatcatcgccatgatggtcagcaccgagaacagcttgtacatgccctcgccgatattccacggacccatcttgtcccacttcgacgtgccccaggcgaagaggccgagcgtgatcgggatcgcgaaggagaagaacaggaagatgaccgtgcaggacacgacgatcgtgtaaaccggcgtatcgccgatcgacaccagcgacgagccccagacgaagagcaccgacaagatggagcccgtccagatcgccgagaccggcgtgcggtacttcgggctgacctttgcgagcgtcttggaagcaggcaggccgccgtcacgcgagaaggcgaagatcatgcgcgacacggacgtcacggtcgcaaggccgcacagccactggctgacgaggatggcgaaatagagcagatccttgacgatgggattgacctgcgcgttcatcgcccagaagaacacgttccagccctgcttggcggcgtcgtccatgttcggcagcatcagcacgaacgagcacagcatgatgtagccgaacagcgccgaccacagcacggaggagaccatgccgcgcgggaccgaatgcgccgccttgaccgtctcttcggacgtatgcgccgatgcatcgtagccggtgatcgtgtagatcggcagcaggagacccagcaggaacacccaggttccagaggtctgcggccagacattgccgcccgcttcgccggaatagttggcgaaggtgaagagacgagcgaagtcgaaggacggggcggcgatgaggcataccgccgacaggacgatcgccgtcgcgaagatcaggtagcccgagaagtcggtgagcttcgcggtcaggccgatacccatgtggttcacaagcgcctgggcgccggtgatgatcaccaggaacaggatacggactgtcgtcgtgtcttccaggccgagataggtcgtgccgaaagagcccatgaagaagtaataggtgccgacgttgatggcgccgagaacggtgacgaggccgagcaggttgaaccatgccgtcagccagccggtgaagcggttgccgagaatggacccccagtgatagaggccgccggccgtcggataggccgagctgatctgcgccatggcgacggcgaataccagcgaaacgaagcaaccgatcagccaaccgatgccgatggcggcaccgccggcacccgatgtcgcttgcgccagcgagttgatgccgccggacagaatgcagatgatcgagaatgaaacggcgaaattcgaaaacgagctcatgcgccgttcgagttcctgggcatagcccatggaatgcaggatgtgcacatcctgcttcttgtcgagttccgaataatcggacatgacgtccccctgtttagccatcaaccgcggaattgcggctgattatccagtgccaaagtgcccgcggcgttttcgcctgcgggcggatcgcagttagactgctccctggggtcttatcttttgtcgtcaggcgtccaggctctgctggagcagccttgtcagatagctggccatgaccccttggccagccgggtctgcgatgaggtcgttgcggacctcgatcattacattgcgcaatccgttcgacagcccgtgcaggaccagcgtgtgcgtcacgccgtccgaggggccgtaaggctggttgcgctcaactcgatagtgcgtcgtccccgccaccgcggcaagcatcgcgtccgccaaccggctatcgtcgtcatgcaggacaccgacctcgacggcgcgcgtcttgccgtggaagacaggcgtgaaactgtggacggtgacgataatcgtctcctgcccccgcgccttgcgatcacgaatgagtgcgcgaatggcgtcatgaaacgggatatacaaggcttcggtgcgcgccgtcttttcttcagcgctcaggcccgcatttcccggaatgtcgtagacctcgcttttctcaggcatcgcgccggccgattccggcggcctgttgcaatcgtagatcaggcgcgaaaaccgctggtgaaccagcgtcgcatcgagcgcctcggacatggcgctggcgaccgcgagagcgccgggatcccaggcgatgtggctgtcgagcgcgtcctcggaaagaccgagcgtcccgaagcgggcgggcaagagccgcgatgcatgttcgcagacgagaagcaccgggctggcgccatcaggtctctcgaccgcaacgcacgccccttccccttttccgagcacttccaaccgagcaagcaccacagtcgctccaccacaactgttaataaaatacttataagaaaagaattcttcagctttccacgagtgtcaagcgcgtactgaaaaaatcttttcatgacagtggttgacatggattgtgacagcgttgttaactttgagtgggaaagtggcacaagaccaatcccggggagcaagatcgcgtgaccgttgcgtcgaagacagtttcagacgtaatccactcgcatttcggcgtgctcacgcgcgccgagaagcagctggctgaaagtctgttggacaactacccggtctccggactgggaagcatcaccacgattgccgagaacgccggcgtgtcgacgccgacggtcgtgcgcatggtgcagaagctcggcttcaagggttatcccgatttccaggcgcatctgcatcaggaagtcgaggcaacgatctccaacccgatcgccaagcacgaccgctgggcatcgaacgcgcccggaacccatattctcaaccgcttcgccgatgccatcatcgacaatctgcgccagacgctgaccggcctcgacaccgcgaccttcgacagcgtcgcgacccttctgtcggaccgcaagcgcaatctctatttcgtcggcggccgcatcaccggcgcgctcgccgaatatttcttcacgcatatgcaggtcattcgccccaatacggcgcttctgtcggccaattcgagcagctggccgcaatatgtgctgaacatgaacccaggcgacctgctgatcatcttcgacatccggcgctacgagcaggaactcgtcagcctcgccaccgccgccagaaacagcggcgccgagatcatcatcttcaccgaccagtgggcctcccccgcgaccaagctggcacgccatacgtttcgcgtgcagatcgaggcgccgtcggcatgggacagctcggtggttactcttttcatcgtcgaggctctgatcgaggccgttcagaattcgacatgggacgagacgaaggagcgcatgaaaacactggagggcctgttcgagcagacccggctcttccgcaggctcggttaggagggacaattacgacagcgcggatgaaacaggtggaaacaaggacatgtcgcaatcgaaacatccttgccaaacgcccacgatacaaagaaaaaatagcgtcatccaactgtcacacaagcttcacgtaacgtcagtaacagcatcgtcggacactgaaacccgaaggagaacaacagtgatctctaatctttctcgactgctctcgctctctacagcaattgttgtggcttcaaccgcaattgctgccgcagagccaagcgctgaactcatcgccgccgccaagaaggaaggcacgctgaccaccatcgctcttccgaacgactggtgcggctatggcaacctcatcgctggtttcaaggcgaagtacggcatcgaagtcaacgaactgaacccggatgccggttctggcgatgaaatcgaagccatcaaggccaacaagggcaacaagggtccgcaggctcccgacgttatcgacgtcggcctctccttcggcccgaccgccaaggccgaaggcctgatccagccttacaaggtttcgacctgggattcgatccccgacagcgccaaggatccggaaggctactggtatggcgactattacggcgttctctccttcgtcgtgaacaccgacatcgtcaagaacgtgccgaaggactgggccgacctgaagaagtcggaatacgccaacagcgttgctctcgccggtgacccgcgcgcctccaaccaggccgttcaggctgtttacgccgccggcatcgcggctggtgaaaaggacgcgaccaaggctggcgaagccggtctcaacttcttcggcgaactcaacaaggcaggcaacctcgttcctgtcatcggcaagtccgcttcgctggcacagggctcgaccccgatcgtcatcgcctgggactacaacggtctttcctggcgcgatacgctgaagggcaacccgccggttgaagtcgtcgttccggcatcgggcgtcaacgccggcgtttacgtccaggcgatctccgcctacgctccgcacccgaacgccgccaagctctggatggaatacctctattcggacgaaggtcagctcggctggctgaagggctattgccacccgatccgcttcaacgatcttgccaagaacaacaagatcccgcaggaccttctcgacaagctgccgccggcggccgcctatgaaaaggctgtcttcccgacgctcgaagagcaggctgctggcaagaccgccatcaccggcaagtgggacagcgtcgtcggcgccaacgtccagtaagactgcttgaatctggcctccccgccgtcaccggcggggaggcttttgcccctccgacgccgcaagaagagctttttcaatgagcactgtttcgacgacgcccgcggtgagcacggccccgctgatcaccaaggaccgcgtgatcgactggctgggcatcgcacccttcattattttcgcgctgctttttctcattgttcccacgctctaccttgtggtcggcgcctttctgacgcccgagggcaacttcacgctgaagaatatcggtgacctcttcacgccgacgatcctcagcgcctactggatcagtatccgcgtctcggtcgcctccgcgctcggcggcgcgctgatcggcttcttcctggcctgggcggtggtgctcggcggcctgccgacatcggtgcgctcgacgcttctcaccttctccggcgtcgcctcgaactttgccggcatcccgctcgccttctcgttcctggcgacccttggccgtaccggcctggtgaccgttttcctgcgcgactggttcggcttcaacctctacggcaccggcttcaacctgctgtccttcttcggcctgaccatcacctacatgtatttccagatcccgctgatggtgctgatcctgacgccggcactcgacggcatgaagaaggaatggcgcgaggcggccgaaatcctcggcgccagcaatttccagtattggaccaaggtcgccctgccgatcctctggccgagccttctcggcaccacgctgctgctcttcgccaacgccttcggcgcgatcgccaccgcctatgcgctgacgggctcctcgctcaacatcgttcccatcctgctctacgcgcagatccgcggcgacgttcttcacaacgccaacctcggctatgcgatcgcgctcggcatgatcgtcatcaccggcgtgtccaacgtcctctatctcatgctgcgcatgcgcgctgaacggtggcagaaatgaaggctcaaaagctcggcgcctggatcgccatcatcatcggcgcgacctatttcatcgtgccgctcctcggaaccatcgagttctcgctgcgcatgcggcgcgacgcctacagtttcgacgcctacctgtcggtcttttccgacgagcgcttccgcgccaccttcggctattcgatgctgatggcgctcctgaccatcgtcttcggcatgctcctgatcgtgccgacggcctattgggtgcgcctgcgcatgccgcagatgcgccaggtggtcgagttcatcacgctgctgccgctggtcatcccggccatcgtcatcgtcttcggctatctgaggatgtacaactcctcgtccttcctgccgatgaccgcgacgacgatgggcaccaacatcctgctcgtgttctcctatatcacgctctcgctgccctacatgtatcgctccgtcgacaccgccatgcgcgccatcgacgtcagaacgctgaccgaagccgcccagagtctgggcgccagctggtggacgatcatgttcaagtgcatcttcccgaacgtgatgagcggcgttctctcgggcgccttcatcacgcttgcgatcgtcatgggtgaattcacgttcgcggcgcttctgagccgcccggccttcggcccctacctgcagctggtcggcgccaaccgggcctacgagccctcggcgctcgccgtgatcgccttctccatcacctggctcagcatgggcctgctcaatctcgtttcgcgcttcggcagatcccgtccggccaaggcttaaggtatttcgacatgtcttttctctcgctgaccaacattcagaaatccttcggccaggttcaggtcgtcaagaacttcaacatgaacatcgagaagggagaattcgtctccttcctcggtccgtcgggctgcggcaagaccacggttctgcgcatgatcgccggcttcgaaaatccgaccggcggcaatctcagcatcgccggcaaggacatcgcgccgctgaagcccaaccagcgcaacatcggcatggtcttccaggcctacgcgcttttccccaacatgacggtgcatgacaacgtcgccttcggcctgaagatcgccggcaagccgaagaccgagatcgacgcccgcgtcaaggagatgctggcgctgatccatctcggccacctcgccgatcgctacccctaccagatgtcgggcggccagcagcagcgcgtggcgctcgcccgcgccctcgccgccaagccgcaggtgcttttgctcgacgagccgctgtcggcgctcgacgccaagatccgcgtctcgctgcgcgaggaaatccgccagatccagcagtcgctcggcatcaccaccatcttcgtcacccacgaccaggaagaggcgctgtcgatctccgatcgcatcgtcgtcatgaacggcggccgcgccgaccagatcggcacccccttcgagatctacaacacgccggccacgcgcttcgtcgcatccttcgtcggcacgctgaatatcatcgaggccaaggtggtcgatcccgccatcaaccgcatccagatcggcgaccagggcgtcacgctgaagcagtcggtcgccacctacaaggccggcgacaccgtctcgctggcgctgcgcccggaagcgggttcgctcgccgagagcaccccgagcgacacgaagctgacaggcgaagtcgtctccgcccacttcctcggctccgtcatccgcacccgcatgaacgtcggcggcaacatcatctccttcgacatgttcaacagccccggcgtcaggccgccggccaccggcgaaacggtcacgctgcgcttcatggcggccgatctgctggttatcagggactgagatcggcggcgctgcatgcattcagcgccatttcaccgtttccaccctcattcctgtgctcgtcacaggaatccagtcagcccaagtccttgggctggaaagactcctccgcgtcgcagacgcgacgctgctggatccctgtgacgagcacagggatgagggtgtttgggtttgcgcgagtgctcgatcttgcccgctgaattgttcgctttgccacacgcgaccgactggtcagcgatcgtgtccccaaaacaccagaaaacgcttgaaatccccaccccattgcgcgacgacggccagacgaagtcatctcgacaacgtcggcccgcaccatgtcgcccaaaccagcggcttgccgccgacgccggacaacaacacaccaagcggataacggccggcgggcgtttctaccggctccccaatacgagtatgtcaatgattacctgccatctgcgttatgtcatcgatccctacaagctcgccgaattcgaggagtacgccaggctctggatccccatcgtcaaccgcatgggcggcaaccaccacggctatttcctgccctccgaaggcgccaacaacatcgcggtcgccttgttctccttcccgagcctcgctgcctacgaagactaccgcacgcgcatggccgtcgatcccgagtgccaggcggcatatgatctggacaagcgcaaccgcagcatcatcagctatgagcgcagcttcatgcgccccgttctcggctgaccgagacgtcaccacatcagcgaaggccgacccgctcggccttgcattggcacccatgacgaggcactgaagaacgatgccggcacctcagatcaagatcctcgacgccctctccctacctggcaacccggccaagccgaacgacgaccgcttcggctataacgaggcctgcgccttcgtggtcgatggcgcgacgggccttggcgaccgccaatacatggacgcgtcgggcagcgacgccgcctgggtcgctgcacgcttcgcggatggcttcaggcaacggatcacgcgtgagacaccggtttccgatgtcgcgcgcgctgtgtcgcaggaggccagggcaacgttcctcggcgacaatcccgatgtgccgcgctacgcctggccgctttccgccttctcgatgatccatgccaccgacaacgctttgaccttctacggtctcggcgattcctgcgtctttctcttgcaggaagatggatcggcgcgctttcacatggccattcccgacgcctatgtcagggagcaggcacacgcgcaaagccatatcgcccgcaccggcggcatcaccagggatggcggcgcgctcgccaatgcggaaacgctggcggccctgcgccgccaccgcgaaagccagaacaccgcgggcggcatctggaccttggggctcgtgccggaatcggccgatcatctcgtgtcggaagaattgaagatcaacggccgcgcccacgccatcatctgcagcgacggcctcgccgatctggtcgtgctctacgaagcctacgacgccgcaagtctggtgcgcacggcgctcgacaagggcctcgccccgatgatcgaggaactccgccgcttcgagcgcgagaccgatcccgagggcctacgctatccccgcttcaagcagagcgacgacacgaccgcgatcctggtcgaactcaccgcctgacatcagaccgacgaaacagcgatttccgattcaggatcaggcccttggcgggtgatcctgaatcattttctccggcagttgaatcagttcctgaagacgcgcccgatcaggccgcgtcttccacttcgtcgcgcggcttcgaaggcacgtagttgagcaccggcccgagccagcgctcgacctcggagatctccatgcccttgcggccggcataatcctcgacctgatcgcgctccaccttggcgacgccgaagtaataggcgtcgggatggccgatatagatgccggacactgacgagcccggccacatggcgtagctctcggtgagcttcacgccggcggcgttctcggcatcgaggagcgcgaacagcgtcttcttctccgtatgatcgggctgcgccggataaccgggcgccgggcggataccggcatattcctcggtgatcagctgctccttgttgagcgcctcgcccttggcatagccccaatactcgcggcgaacctcttcgtgcatccgctcggcgaaggcttccgcgaaacggtcggccagcgccttgacgaggatcgacgagtaatcgtcattggcgcgctcgaagcgctcggcgatcgccacttcctcgataccggcggtaacgacgaagccgccgacataatcctgtacaccgctgtcgaccggcgccacgaagtccgacagcgccacgttcggccggccatcgcgcttcgagagctgctggcgcagcgtgtagaaggtcgcgagctcttccttccggctgtcgtccttgtagaggcggatatcgtcgccgacggtgccggccggccagaagccgatgacggcgcgcggccggaaccatttctcgtcgatgatcttcttcagcatcgcctgcgcatccgcccagagcgcacgtgccgcctcgccctgcttctcgtcctcgagaatggcgggatagcggcccttcagctcccaggtctggaagaacggcgtccagtcgatatattcggcgagcgtcgccagatcgtagtcctcgaacaccttggtcccgaggaaactcggcttggcaggcgcgtgcgccgaccaatcgaccttctgcgcgttctcgcgagcacgcgacagcggcagacgcaccttctcggcctcgctgcgggcgtgcgctgccgcaaccttggcgtactcggcgcggatatcggtgatgtagccgtcacggttctcgggcgagagcagcgacgagaccacgccgaccgcgcggctggcgtcggtcacgtaaaccgtctggcccttgttatagccgggatggatcttcacggccgtatggacgcggctggtcgtggcgccgccgatcagaagcggcagatccagaccctggcgctccatttcggccgccacatgcaccatctcgtcgagcgacggcgtgatcaggccagacaggccgatgacgtcgaccttctcggccaccgccgtctccaggatcttcgtcgccggcaccatgacgccgaggtcgatgatctcgtaattgttgcaggcgagcacgacgccgacgatgttcttgccgatatcgtggacgtcgcccttgacggtcgccatcaggatcttgccggccgacttgcggtcgtcgccgccgttcagccgcttctcttcttccatgtagggaaggagcacggccacggcctgcttcatcacgcgcgccgacttgacgacctgcggcaggaacatcttgccagagccgaacaggtcgccgaccacgttcatgcccgccatcagcgggccctcgatgacgtgcagcggacgggcggcggcaaggcgtgcctcttcggtatcggcatcgatgtattcggtaatgccgttgaccaaagcgtgttcaagacgcttctcgaccgaccattcgcgccaggagagatcctgcacgcgtccctcgcgcgcagcaccgccacggaacttctcggccacttcgagcaggcgttcggtcgcgtcgctgcggcggttcagcaccacgtcctcgcaggcctcgcgcagctcggcgtcgatctggtcgtagaccgccagctggccggcattgacgatgcccatgtccatgcccgcctggatggcgtggtagaggaacacggcgtgcatcgcctcgcgcaccggctcgttgccgcggaacgagaaggagaggttcgaaacgccgcccgatatgtgcaccagcggcatcgtcttgcggatcgtccgcgtcgcctcgatgaagtcgacgccgtaattgttgtgctcctcgatgccggtcgcgaccgcgaagacgttcggatcgaagatgatgtcctcgggcgggaagccggccttttcggtcaagagcttgtaggcgcgcgtgcagatctcgaccttgcggtcataggtatccgcctgcccggtctcgtcgaaggccatgacgacgacagccgcgccataggcgtgcagcagcctcgcctgcgcgaggaaattctcttcgccctctttcagcgagatcgagttgacgatcggcttgccctggacgcgcttaagaccggattcgatgatcgagaacttggagctgtcgatcatgacgggcacgcgagcgatatccggctcggctgcgatcaggttcaggaactcgaccatcgccttttcggaatcgatcaggccttcgtccatgttgatgtcgatgatctgcgcgccgttttcgacctggtcgcgcgcgacatcgagcgccgccgtgtaatcggcattggtgatcagcttgcggaaacgcgccgagcccgtgacgttggtgcgctcgccgacgttgacgaagggaatgtccttggtcagctcgaagggctcgaggcccgagagcgacatgaaggggcgatgctcggggatcgggcgcggcttgtacttggcgacaacttcggcaatcgccttgatatgttcaggcgtcgagccgcagcagccgccgacgatgttgacgagaccctcgcgggcgaactcgtcgatctgcgccgccatcagctcgggcgtttcgtcatactggccgaactcgttgggaaggccggcattcggataggcgcagatgaaggtgtcggcaacgcccgacagttcctgcaggtgcggacgcatggcgttggcgccgagcgcgcagttcagcccgatcgtgaacgggttggcgtggcgcaccgagttccagaaggccgacggcgtctggcccgacagcgtgcgaccggaaaggtcggtgatcgtacccgagatcatgaccggcaggcggatgcccttggcctcgaagcgctcctcgcaggcaaagatcgcagccttggcgttcagcgtgtcgaagatcgtctcgatcaggatgatatcggcgccgccgtcgatcaggccgtcgatctgctcggcataggcgatgcgcaggtcgtcgaaggtgacggcgcggaagcccggattgttgacgtcaggcgagatcgaggccgtgcggttggtcgggccgatggcaccggccacgaaacggcggcggccatcctcgcgctcggcgcggatgcaggcgcggcgcacgacttcggcaccttccttgttcagcgcataaacctcgccttccatcgcgtaatccgcctgcgcgatgcgggtggaggagaaggtgttggtctcgagaatgtcggcgccggccttggcgtatttgtaatggatctcctcgatcgcatccggctgcgagaggatgagaaggtcgttgttacccttctggtggcaggcgcagccgatgaagcggtcgccgcggaaatgatcctcgtcgaaacccagcccctggatctgcgtgcccatggcgccgtcaaggaccagaatgcgttcgctggcggctttcctgagcgccgcgaacacttcactgccgtcgcgcttttccccttcggggccaaacagattgttgaacacgggcggactccttgacgtcattataaagacaagccgcccaaatcacataaagatatctttatgtcaatatatcagcgacattttcgccattgccgacgcacggcggatgacagactcgaacgccccctatataggcaatttcaaagcattgtgtatgaaatcggaggagtatcatggcacctgcaatcggcgacgccgcgctcggcaactggacgacgcgcgcctaccaccgcgactggctggtcgcccaggccaacggcctgttcgatttcttccagcatgactcgatcaatcccaagggtgggttctacgatctcgacgacaccggcaagccgctcgacgccgagggccaggtgcgcggcatccacatcgccgcccgcgccgtccattgcttctcgatcggcaccctgctgggacggcccggcgcatccgatgtcgtcgatcacggcatgcggtacatctggaaccaccaccgggacctagagaatggcggctatttctggtcgctgaacaatgacggccccgtcgacaccaacaagcagggctacggccacgccttcgtgctcctcgccgcctcctccgccaagaccatcggccacccgcttgccgacggcatgttggccgacatcacagaggtgctgaacacccgcttctgggaagacaagcacggcgccatcgccgaggagttcaccgccgactggcaaccgctcgacggcggcacctatcgcggccagaactccaacatgcacctgaccgaagccctgatggcagccttcgaggcaaccggcaaccgcgactatctcaccaaggccgaaagcatcgccgacctcgtcatccgccgcgccgccggctccgtcgactggcgcgtcgccgagcatttcgacacggaatggaagctcgacaagacctactatcatccgaacgagatgttccgtccggccggcaccacgcccggccactcgctggaatgggcacgccttctgctgcagctctgggtgctcggcggcaagacgctggaatggctgccggatgccgccaagggcctgttctcgcaggcaatggcgctcggctgggacgacgacaagggcagttttttctacacgctcgactgggaggaccgcccggacaagcgccagaagatgtggtggcccgcctgcgaaggcgtagccgctgcccactacctcaacgaacacctgccgagcgactaccacgaggaaagctaccgaaagatctggaacgtcatcgagcgccgcttcatcgaccacaaaaacggcggctggcacgaggaactgacggaagacatggtccccgcccacaccatcttccccggcaagggcgacatctaccacgccctgcaagcctgcctcatccccctcttcccggcgaccggcagcctgaccaaggtcatcccggaagccggcggcaagatctgacgatggaacgaggcggcgccgcatccacggcgccgctgcatgaaggtgacgcaatcccgcaagcggatgcctaggggcacatttcattcccgatcggcggtgagcctgcgagggccaggaccttccacggccagcctgtcgtcccaattgacgagtgcgcatttgtcgatcgaaagacagccgcaccctatacagtcagacaagccgtctctcagcccttttagctgctgaatccgcgcgtccagttcaactgcccattccgcagacaacaactcccaatccgcgcgcgacggtgttcgcccgtctggcagtcgtgccaaagctctgccgattgtcgacaacggcagccccaagttttgcgcaacgcgaataaccgcaaccctgcgcaaaacgtcgctcgtgtagcgtcgctgattgccagatgtccggtgactggagatcaggcccttcgcttcatagaaatgcagagtggacacagcaactcccgctcgcgcagcaacctctccgacagtcagttctcgtgtcattgaaaaatccccttgacctcaagtttagctgaggttgtacggatttcaagctgacaaccattgcggcccaaaaagtggctgtaaccgccttgcatagggagagcaccttgatcgcgttctttcgttactcgacgcccagatactcagcgcgtatcaggtttgctggtgcagttgcgctgcagctacttggcgccgccgctttggctggcgccctttgccttctggacagcttttgggagaagccgacggcgccgttggttagcctgattgtcgggttaaccggcactctgatcggcttccatggagtagcgctcgtccggcctctcgcgaaccggcgcatcggctttgtggcggcgtccttgctgatctttgcaaccttctattggcttgtgtcctcctcgcttcctgatctcttgctttcaaggttgttctacggatgcgcagtcggggctttggccgcgatggtctttcgatggtgcttccttgagccacccgtaatgccgcgcgtgtcgtgagaaaaagcccagaagcctgccccgccgacgaccaatcacgacgacggaatacgcggttcctccaccagatagaactccgcgaccggcgtgacgtcggaaacgaagaagccgaatttcgattgctcaccgggatcgagatgcccctcgtcgaaattcagacgatcgaagctctcgaagcggctttcgaaatgcatgaagcggctggacgagatcagcgccggatcgggatcggcctgcccgaaggatagcccgtcatagaagtcgctcggcttgccgcggatttcctgcagctcgaagccgaagccgatccatgccagaccgctccggttcaccgtcaccacccgcagatgaaacgagcccggcaccgtcgctttcagctcggcgggtttggcgaagcggatcaccagcgtcaccggcgcaagactgtcgaacgcctctcggatctcgatcggatcctcccgcgtgccggaacctgagatcgacaggatgcggaaaccgccgagttcgtcggaaaacgagtagctccccgcataccaccgcccgtcatccgccggcccggcgccggtcagcgccagggagagcaacgccgcaagaatgcgcaaacgacgcgtcatcgaccctcttccctgatcgagatgtcgccaccatacatgcaatttcagcggcgtgcgatgccatgcattttcacgcgcgcgaacccctcatcggtggtacgctgacgcctggcttccaaacgaaacatgtgaatgcaacgcaggagcggaacatgacgacagtgttcgtaaggcatgaggtttcggactatgcggcctggcgcaaggtgtatgacggcttccggtccgttcaggcggaaaacggcgtgatatcggaggcggtcttccaatccgccgacaatcccaacgacgtcaccgtcacccatgaattcgcaacaccggaagccgcgaaggccttcatgcagctggaggagctccgctcggccatgcgcacgggcggcatccttggcgccccaagcgtctggctggtcgaaaaggcgtaaagccgttccggcccggtcggcatgacgtgccggcgcgttcccgtgagggtgtcacgccaggcgcagcgcgtccagatccttggccagcatcagcgccagcgcctcgacgacgagattgtggtcgtcgcgctgcggcagaccggaaacggtcaccgagccgatgcagccggtgcccttgacattgatcgggaagctgccgccgtggggcgcgtaatcggcatcagacagaccgttatccgcgatcgtctttcccttggccttcaggtcgaggccgatggcatagctgctgcggaaatagcgcagcaccagattgcgcttgcggcgcacccattggacgttgtcgggtgtgaccccgggaagagccacatagaagaccggcatcgaatgcaggttgatatcgatcgcgatacccagaccacgctccgaaccgagctcctgcagcaacttgcccagctgccacgccgtcgccagatcgaaactgtcgaagcgcagcaccttctcctgctcggcaatgcgcgcaagatcgtcgtccggcatggtcatgtctgcttcctctccttaaatgctttttgctgagcatcgccaggagagcgaaaaagtaaagcggaatcgtggtgatccggccgcgccggagatgcctgacacgacatgggaaaatggccgagggccgccttcacggaaccgcgaccggccggcctcaccccgctgcctgcatcggcgcgaaccggctcatctcgccggcaaagggcttggcaagcggcgccgcgtaggagccgcgcttgctggtcgaaagaccaagcgacaccagcgcctctgcctgcttgacggccgccgcaacgccgtcgaccacgggcacgccgtagatctcccgcaggtcgcgcgccagatcggtcataccggcgcagccgagcacgatcgcttccgcgccatcctccctgagcgcccgctcgatctcggcacgaagcttgccgatcgcgcccgacgcttcatcctcaagctccagcactggaatgtcagacgcgcggaccttcgcccggtcccccatgccatagcggcgcacaagattgtcgatcagcacccgcgaccgctccagcgtcgtcaccacggtaaagcgctgcgccaggaagccggcggtggcgacggcggattcgcaaagcccgagcaccggcacgtcggcgaagctgcgggctgcctcgagccccgtatcgtcgaagcaggcgatcacggccgcatcataggtccctgcccgctccttcagctccatcagcagcccggggatggcgagcgccccgtcataatgcccctcgatcgacaccggccccattctcgaggtggcggcgatgatctcggtgccggaggcggcgacgagccgtgcggcggtcgccgccttctcggtcatgcttgatgtcgtgttcggattgacgatgagaatacgcatgggatcagcttgtctttgcctggcgcccgcgcagcagcatcatgatgccgagcgcgaccagaatgatggtgaaggaaaacagcgtcgtcaccgtaccgagcgcgtagagcaccggcgtcgtcacgttggtcgtcatcccgtagatctcgagcggcagcgtgttgtagctgcctgaggtcatcagcgtgcgggcgaattcgtcataggagagcgtgaagccgaacaggccgacgccgatcaggctcggcgcgatcatcggcagcacgacatgcacgaaggtctgccacgaactcgccccgagatcgcgcgccgcctcttcataggccggcgagaagcggttgaagacggcgaacatgatcagcacgccgaagggcagcgtccaagtcagatgcgcgccgaaggccgacgaataccaggccggcttcagcccgccctgctggaacacgacaccgatgccgagcgagatgatgatcgacggcaccacgaggctggcgaccgtcgcgtagaacagcaaggtcgcgccacggaagcgacggcggaaggcaaggccggccagcagcgacaccacgacggtgaccaccatgaccatcaggccgagcgagaaggagcggcggaaggaagccccgaaatcgcccaccgcctgcttttcgaacaggttgtagaaccagtggacggaaacgccgttgagcgggaatgtcaggccgccatccggcccctggaaggacaggatcaggatcgccgacagcgggccgtagaggaacagcacgaacaggatgaagaaggcggcgagcacgtagaattcgagcgtgcgcttttcgtggctcatcttaaagctccttgcggatatcgacgacgcgcaggatggccgcgaccatcatcagcacgacgatcagaagcacgacggcattggcggcggcggccggatattgcagcagcgacatctggttcttcatcatcagcgccaccgaggcgctctgcccgccggacatgacctgcaccgtcgaaaaatcggccatgacgagcgtgacgacgaagatcgaaccgatggcgatgccgggcttggcgagcgggatgacgacgttccagaggatctgccagccactggcgccggcatcgcgcgccgcctcgaacagcgagcgatcgatgcgcatcagcgtgttgaagatcggcgtcaccatgaacagcgtgtagaggtgcaccatggcgagcaccacggcgaaatcggaatagagcagccattcgatcggctgcgggatgatccccatctcaatcagcgccgagttgaccagcccgttgcggccgagcacgggaatccacgaaatcatgcggatgatgtttgatgtcatgaacggcacggtgcagacgagaaacaggatcatctgcgtcgatgtgcggcggatgtggaaggcgaggaaataggcgacccagaaaccgatgaagacggtgagcgcccagacgatgacggtgaatttcagcgtgttgagataggtcttccacgtcacccacgagccgagcgtttcggtatagttcatcgtcaggaaatcgggatagagaccggcgaagtcgtaatcccagaaactgacgacggcgatcattgcgatcggcaggatgaagaagaagccgaggatcaggatcagcggcaccgcctgcagataggaggcggcccacggcgccagccgaaagcccgggctgcgcacccgctcggtcgtctcgtttgtctctgctgaagcgatcgtcgccatcgctgatcccttttccagttggcattgcgttgcgtgacgcccccctctgccctgccgggcatctcccccacaggtggggagattggctgggtgcaaccgctcgctccacgctcattgcttgcgtggggagcaggccacgggtcgatctccccccttgtgggggagatgtccggcaggacagaggggggtaacccacggcagaacctcccctcccgcgattggaaggggagaccccagatcgccctaagccgcgatgaactcgttccagcggcgaaccatgtagcggtcctcgtccatgacggagttccagcacgcgacgttgcccatgcgctcttcgaacgaaccaccgtcgcgcaccgcgccggccttctccatgaccttgccctcgggcgaaaggatatcgccctgggcggccttgccttcgatccagtagccccactcgtccgccgtcatgaaattcttggcggtatccatgcaggcagagtagtagccttggcggttgaggtagccgccgacccagccggatgtgtaccagttgatgtactcgtaggcggcgtcgagctgcgcgcccttgaggtgcgaggcaagaccgagaccaccgccccatgagcggtagccttccttgagcggctgatacttgcaggcgatccccttggagcggacggcggcgacggcgggcgaccacatggactggatgacgacctcgcccgacgccatcaggttgaccgactcgtcgaacgacttccagaaggcgcggaactggccgtcctgcttggtcttgatcaggaactcgatcgtcttgtcgatctcttccttggtcatgttgcccttgtcggcgtacttgatgttgcccagcgcttccatgatcatcgcggcatccatgatgccgatcgacggaatgttgatgatcgaggtcttgcccttgaacttcgggtccatgatatcggcccagctggtgatatcgcggccgacgaggtcggggcgaatgccgagcgtatcggcattgtagatcgtcggcatcatggtgaagagttcggtttcgcccttggcgaaggtcttggcatcggcgctctcgacatagccgacggtatgcggcgcggtaccctgcgcgatcacgctgtccggtttcagcttgccgttcttgaacaacggaacgaccttgtcgtaatatttcagcttcttcacatccatcggctggatgacgccggtcggatagaccttcttgaggatccagtattcgatgtcggcgatgtcgtagctgtcgggctgggtgacggcacgctgggcggcggcgtcggaatcggtcgccgtcatctcgagcgtgatgccgaggtccttcttgcactgttcggcgacggcgttgatgttggaaacgccggtgccgaactggcgaagcgtgatgttcgactgcgcccagatcgtcgggaagccggtaatgagcccggagccggcggcagcgccaagcgctgcggcgccggtcttcagcaggccgcggcgcgacacgcccttgtccatcagacccttcccggtggttttcgttgtatcagtcatgtcagttccctctggtttttgtggtaattgatagtcatgccgaaacgcggcccaggagaacggcgtcctccagtgcccaactcagggacaccgcatcgccgaccgatgcggggttggcgaaatagtcgccatcgctggcgatgaccgtgaagtcatcgctgcccgcgccgaccacggtgatcttcaccgaggcgccgcgatattcgatgttggagacgataccgttgaagccgagcgtcttgtcggtggcgctggcgaggcgaacacggtcggtgcggatgccgatatcgacgacctcgcccgcaagcctgccctcgccccgcaccgaaaacgtctgcccctcaggcacctcgagcgtcaaaacgccgtcgccaacggatctcacgcgacccgtcagcacgttgtgatcgcccatgaaccgcgccacgaaggcggtggcaggctcctcgaacaccttgcgtggggtcgccgcctgctcgatcttgccgtcgttcatgatgacgatgatatcggcgagcgccatcgcctcttcctggctgtgcgtcacatgcacgaaggtgatccccagcgtcttctgcagcttcttgagctcggcacgcatgcggatcttcaggaacggatcgagcgccgagagcggctcatcgagtagcagcgcctccgggtcggtgatcagcgcccgggcaagcgccacgcgctgctgctggccgccggaaagctgcgccggacgcctgttggcataggcctccatctgcatcagcttcagcatctccagcgccttggcccgccgctcctgcttctccacgcccttcatcttcaagctgaaggcgacgttgtcgatcaggtcgagatgcgggaagagcgcgtaggactggaacatcatcgccgtgccgcgcttggccggcggaaaatcggtgacgacggtgttgccgaggcgaatatcgcccgatgaaatgctctcgtgcccggcaatcatccgcagcgtcgaggtcttgccgcagcccgatggtcccaggaagcagcaataggagccagccggtatcttcaggctgatcgcatgcacggcggtggttgcgccatacaccttcgaaacggatgctatatcgatctctgccgctttcgacatcgtgtcttcccctgttcgaggaagacgatgcattcgccgtgccagtttccgcgagggggtatcaagcctctaggaagattgagttttcgcccaaaacacacgaatgaccaaaaatagacctccgcgtatgcctgcacatcaaataggctttcgtctgcaatttacgcaaaaaatcgtatacgatttgacggctcgattgattgcaaattccgtttaactttccggccgattgtggctatcatcgaccggccacaggacatccagcctcatgaacccgacctccagcgcgcttccgacgcccgacgagccgacagaaaccggcacgcagcagatccgcgacgccattcgggacgcgatcgtcgaacgtcgcctgtcaccggggaccaagctgtcggaaagcgatgtcggcaacctcttcaacgtcagccgcacactggcgcgcgcggccctgcaggcgctctcctatgagggtctcgtcagcgtcgaaaagaaccgcggcgccttcgtggcatacccctcgcccgacgaagcgcgccagatcttcgccgcccgccggctgatcgagcccggcatcctgcgcgaggcagcggccaggatcacgcagtcgcagattcagcacctgcggcagctgctgctggaggagagccgcttgatcggcgagcgtggacagacggcccggcgcgccgaaatcaaggcatccggcgattttcacctgacgctcgccgcgatctccggcaatacgatcatgcagcgcttcatggaggagctcgtggcccgctcctcccttgtcatcgcgctctacggccagtcgaccatatcgagctgcggccacaacgagcatggcgacatcgtatcggcgattgaaaacaaggatctcgaccacgcctgtcacctcatgcttcaccacatcgcgcatatcgaggccgacctcgatctgcgagaacgcaagggacagggattgaaggaagcgttcgatctttagaccgcgcgcggggcatcaagggcgcgcccgcaagatcgtgtaaaacccgcgacctcgatcggggctcgggcgagacgcgaccgccgtagcggccgcgtcatcgaaaatcaaccgcgcgagcggcgttcgtcgggaacggcggcaacggccacgatatcgggcgttccggtcgcatgcaggcgcttgcgcaccagcacgcccatgacgcgggcggcggtcgaaaacgtcatctggtcgagcgggccttcgccctcccagggtttcgtcagtcgctcggtcacggcgccgacgatattcatcggcacgatgtcgtcgcactggcgcatggcctcgaagacgctactgatcggaacaacccggccttcgaacgtgacgatcggttcggtcagttccgtatcccactcttcaaacgcataaagagcatcgcgaaagagctcttgaagggtgaacggggcgtgcccattgtgaagtggcggcaaggcattcgacatgtctgtctcctctttgcagggataaagccaattcctcctcatcggtccgcactaacgccggaagcagaactcaggttcccgaccggaccgaataacacgatcgatgttatagtgtaatatacgcgtgataaagcgcttttctgccccggcctggcgagcgcggcggccgcaaaaagataagccgttgatattcaaaggaatatcaacggcaatcttttggtaacttaaattaacggatatgggcgccgcgctactgcgcgatcgcgaatgtaacgttgacgctgatgttgtagctgctttcgccaccctggatcggcacggctgcatcggcctccgtcttcatcatcgccgcccgcatgacgggcatcggctgcggccgcggcccgttttcgttgatctcgatgacgttgccgagcttgacgccggcggcggacgcaagcgtcttggcccgcgcgacggcgtcggccaccgcgttcttgcgcgcttcttccatggcgctgtccggcttgtcgttggtgaactggatatcaccaccctggttgacgccgagcgtcaccgactggtcgatgatcccaccgagcttcgagagatcgcgcacccggaccgtcagcgtgttggagacctggtagccgatgagttcgggcggcagctgctgcccgtcggtcccctgcggatagcgatattgcggctgcacggaaaagcccgatgtctgcaggtcgcgctcggcgatgccggccttcttcagcgcggcgagcacgtcgctcatcgccttgttgttgccgtcgagcgcctcgcgcgcggtcttctcctgcttgacgacggagaaggtcaggacagccatgtcgggcgccatcgtcgcccgcccctcgccgatcacgctgatgaccgcctggcgcggcgcatcggccgcgaacgccggcacagaggccgcgacaagcacgggcaggctgagaaggagaccggcggcaaagcttttggtattcggcaatggcattgtttcactccgcgattgtgacttaccgatccctcttgccgtttgattgtgaagctattgcggcaatgacttgtgaccgctctgaaattgcgttagacgcaacgagcaccggcgaaccattgcgccgctgccaggcgccgtcacagtcgccagggcctgtagctcaatggttagagccggcggctcataaccgcttggttgggggttcgagtccctccgggcccaccatctatttccaaaggcttagcaggaatttacgcagttccgctaagcccttttgcgttttgggctgcggttacaacagcgtttgccagaccaggtgcttcagaattcgcggcatcgagcgtgatgctcgaccaattgcagccgagtgaggcagcgctgtgataattaaaagctgcgctgaatggctttcaagccgattgacagaggacgctttgttcgcaatgtggctcgcgtcaaggttggggaatcttttatgcataaaacaactatcgcggcatcggccctcgccgtgctgctaagttcctgcgtccagtccagcaccatgcgggtctcgagaaaccaaatgatcatccagacgagcgcggagccgatgtgcggcagtgttggcgcggctaaggcggcacagaaacaggctgccgtcgagaccatcaaggcgggctacgatcgctacatcatcacgtcagcagcagcggcgaacaacgtcaccgcaacccagatgccaggaaactacaatacctatggcaccatcaactcctatggcggatacggcacggtcaatgcgacgacaacctatacgccagggccgatcatctacggcggttcgcacgaccagtccattgggatcgtaatgttcaaggatggcgaaccaggcagcagccaggctatatccgctcgtgacatccttggccccaaatgggcggtgattgtcaaggatggagtgaatctctgcaattagtggcctgctcgaacaaagcatggctgatagcgcaacgggctcatcgttcgatcgcggctagcgctgtaagatgctcggattgtccggtggcgcgcacgatcggggttgagccctgcgtcacctttcaatgcccgagcacccctttatgcgtcacacgccccccaccgcctcggccaccgcaatctccgccatcttcagcgccgcttcgcggctcctggcggcggcgatgaagcggccgttgtggcagaagctggcgccttcaacgccgcttacggcttcgaggtcgccgttggtgaggcccgcccaggcggccggcaggtcggcgcgcagcgtaaagccctcctcctcgcggcggatgccggtcacgcaccagtccttgtcgcgcgggtggacgacgaagagcaggtggtcggcgccggccttgacgatggcggggcggaagggcatgcccatcggtagttccagcacacggctttcgccggcagcgatgatcgccttgtgcaccagcgcctccgccctgcgcttcgcagcactctttgatatccgcgcctcgacgaagctgcgcgcgatggcgagtgtttcgtgaaaggcgcggtcgtcggcgccgggatcggtctcgtcgaagaccggcttcagcgtttccaggagtgccggcagcgtcagcccggcaagcggcccggaggggctgagcgcgccattgtcggtaagatcgatcggcagcacgaagctgccgtcgaaagaggcgtggatatcgtcgatatcggcctcgggaatatcggatgcggccagataatcgcgcccgtagtgcttccagatcaggccgaacgagctgtagggctggccgtcttcgcgcagcggcgcgccacgctggtggtggtcgaagatgcgcgccgcggcgtcgtaggcgccgccgacatcgtaaatgatccggtcgggccccggtgtgatccattccggcgcacggctgcgcatgatgcgcgcctcgggaaagagcttcgtcagaatgacggtggagagcagttcgtcggcatggaagccaccggaatgcgtgacgagaaattcaggtttcatgcggcggcgccctcttgtctgcggatcatccgcatatggcaccagatagccgttggcgcatacgacctcaacccgcgcgaggcgcattttcatgcactgatgctgcactgcatcatgcaatcggatggattgccgcacgtcgcaggccatgtccttgaacccggccgaaggttaaggtttgctttcatgcggacatcctgaatatcacgaaacggtgaattttacgcttgccatcggcaaacgcccgcgcgagtatcaccgtctaagcatgatagtgacgggaaccacacgtgcctaaaacgggaataatagcggtatccgggacatccatgtcccaccagtgcattttcacggccgatgacggtggcggtaaaatccgcggctgtccgcgctttctcggaatgatcttcgggaagccaagcgtgcgcctcgccgacacggcgaacggaggatgggcctccatcgaactcggcaaggtggatcgacgcggcaatgcgacgtttcgctggcgctagcatcgtctgaccttcatgtgctgcccgacatcaaatggatgtggcgcctgacacgagggaacaaaatccgcgctccggccgttgaaacggcatcgccgtattgcggcttggaggggcgcggaggcgccggcatcggatggcgcgtcagacctattggaagggttatctcaagctgtcgctcgtaaccgcgtcggtatcgctgacgccggcgaccacggatagcaaccagctgcggtttcatgtgctgaaccgcaagaccagaaatcgcgtagaaagccgctatgtcgacagcgtcacccataagccgatctcggacaaggatcaggccaagggctatccccgcggcgaggacgactatgtcatcctcgaggacgacgagatcagcgaggtcgggctggagagcacccgcacgatcgacatatcgagcttcgtgccgcgcggctcgatcgattggatctggtacgacaagccgcatttcctggcgccggaagacaaggtcggcgtcgaggctttctgcgtcatccgcgaggcgatgaaggcaaacgatgtcgtcggcatcgcccgtctcgttctctaccgccgcgaacgcgccgtgctgctggagccgcagggcaagggcatcgtgctctggacgctgcatttcggcgacgaggtccgcgagccggccgggaccgtcgatcttgctgccaagaccgaccagaaggtgctggcgctgatgagcaagctggtgaaggaccgcaccgaggaatggaaaccctcgatggtcaccgatcccgtgcagaaacgcatccgggcgatgatccgtgccaaacagaagagcctgccgaagcccgtggcggcaacaaagcgcccgcccgtcaaatccaccggcaacgtcgtcaacatcatggacgcgctgaagaagagcatcgccaaggatggcggacggtcgaagcactagctcggcacatatttcaggcgatcgtcacttgcgcttttcaagcggcgcggcggccttgaagaaatcggcccagggatcgcttgccagcgaattcatccgcgacggcgtgttgtcgaccgtgaaatagcccgggccgatctctcccgtcagctccttccagtcgagcggcatcgacacggcggcacccggccgggcgcgggtcgaataggcggcgacggcggtgttgccgcggccgttgcggagataatcgatgaagatcttgccgttgcgtttcgccttggtggcggtcgccagatatttgtccggctgatctttcgtcatcgcgtccgccagcgccttcgcgaaggccttgacctgcacccatccggccttcggcttcagcggcgtcaccacatggagacctttgccgccggaggtcttcacgaaggcagccagccccgccgcctcgagccgctgcttcaactcgtgggccgcagcgatcacctcggcccaggcgacatcgtcggccggatcgagatccatggtgatcatgtcgggcttctcgaagctcgcggtcgtcgccccccaggggtggatctcgagaacggcggattgcacgagcgccacgagcccatcgaaatcagcgatacgcagcaacttttcgccacccctgtccttcgggtccgcgatctcctcgatatgggcgttcattcccttccaggcatgcttctggaagaagcgctggcgcccggcaataccgtcagggcagcgcagcagcgccagcgggcggttgaccacgaagggctccatgaagcgccagacctgcgcgtaataatccgcaagtccctgcttggtgatgccctgatccggccagtagatgcgatcggggtgggtgagcgcgacgttcgattgcggcgccggatcggccttgcctttttcggtctcgcgcatcacatcccccgccgccttgtcctcgcgcagcccgcgaaacgccgcatgccgcagattgccgtccgccgaccatgcctgaaactccacatccgccacaagcctgggcttgacgtggacaagcccgcgccgcgcctcggccgacagagcgtcgtcgaaggcggttttcgcctgccggtcctgcgaaagacggtcatgcagcattctggcggtcgaaaccgagaatccggtgccgacgcgtccgacatagtgaagcttgccgcccttgtaatagcccatggcgagcgaaccgatggcattcttcgtcgccgtcgagggcacgaagccgccgatgacgaactcctgccgtttcgagcacttggacttgatccactcgcccgtgcgccccgagctataggcgctgtcgccgcgcttggaaatcaccccctccagccccaggccgcaggcatggtcgagcacgagcgaacccttctcggtgaaatggctgctgtagcgcagtgtcgggttatcaggagccagaagcgtttccagcaatgccttgcgggaaagcagcgacacctcgcgcatgtcgtgcccgtcgagatgcaggagatcgaaggcgtagaacacgaagcggtccttgcgcccttcgctgagatcgctctgcagcgcggaaaaatccgaagcgccattgtcgcgctcgaccaccacctcgccgtcgatcagagcagattgcaccggcaggtccgaaaaagctttcgcaagcgtctcgccaaaccgctccgtccagtccaggcccgtgcgcgtcagcatcgtcaccttgccgtggtcgatcctgatctgcagcctgtagccatcgaacttgatctcgtgcacccactcgtcgccaacaggcggtttcggcttcagcttggcgagcgccggctcgacgaagtcagggaggccggccttgaccgcaccgtcgggccattggcgcggttcggccttggtcttggtcgccctcggcttgggatccgacgacttggtgcgccccttcccggcctcactgctgtccgtccccttgggccgcgagtgccaggcggcatccgggttcttggccacttcctcgatcttgcggccggtctttgccgattcaggccgcagcttcaggatatcgcccttgacgcgcgcttcctcgtcctcggccttgatcagcagccagttctcccgggtttcgccgggcttgccgtgcatccgcaccagatgccagcgacccttcagcttgtcgccatcgaggtcgaattccatgtggcccttcttgtaggccttgcgcatgtcaccatacggcgcccatgtgccgcgatcccagacgatgacggtgccgccgccatactcgcccttcgggatgatgccctcgaagtcgccatagtcgagcgggtggtcctccacatgcacggccagacgcttgtcgtcgggattgaggctcggcccgcgcgtcaccgcccagctcttcagcactccgtccatttccagccggaagtcgtaatgcagccgcgtcgcgtcgtgtttctggatcacgaagctcagcgcgttgctgtcgcgcgccgtagaggcacgttttcctccgcgcggctccggcgtccgcttgaaatcgcgcttggcgtgataggtctcgagcgccatggtcagctcgccctcttcgagccgccgttaccgcgcgcggcactcctggcggatgccttgcccgccgtcttgccactcgtcttcccactcgccttgccgctcatcttcgcgctctcgcgcaacgcttccatgaggtcgatcaccttgcccttcggctcggccgtgcgcttgggcagagccctgccctcgatcttcgcctgcaccagttcggcaagcgccgcctcgtagcgatcctcgtagtccctgggattgaagctgcctttcttggtgccgatgatatggccggcgagttcgatcatttccttgtcgaacttgatatcgggaatatccttgaaaaccgtctcggcgttgcgcacctcgtaatcgtagttcagcgtcgtcgcgacgatgcaatcgtcctgcggcctgatcagcacggtgcgcgtcttgcggaacagaacagcctcaccgagcgcggcgaccttccggtcccccatcgcccgcgcgatcagcgccagcgcctcctcgtcgtcctcgctgaccggcgccagataatagggccggtcgaaatagagcttgttgatctcgtcgtagggaacaaacccctgcacggtcaggagcttgtcgctctcgggggcgaaggcggcaagctcctcgccctcgatcatgacgtagtcgccgctatccagccgatagcccttcacctggtcgtcgcgttccaccggctttcccgtctcgctgtcgacgaactgccgctcgacgcgatggccggtcttgcgattgatgatgttgaaggagatgcggtcggcgaccgataccgcggtgtagagccccaccgcgcagacgagatcgcccaccttcagatgccccttccagcttgcccgcgcggccatgtctatttctcccgccccgtgttgcgccgccggcgctgatcaagcgtcacgatcttctccaccgaggcgatgtcgtcgctggtcacgaaaggaaccggatcgccggcgatcgcctccagcacgtcgctcgacagcgcgccatggcggatcgcccactccagcgtttcgcgggtctcacgctcggccttcagctgcgcgtagagcgcgatgatcagccggtcgcgtgcatcgaagtggccgcgtttctcatcggttttgcggacatgcgccatcgaaacctgcctcccttgccggttggagcagtaaccggccagcggccggaaagttccgcgcatccctcacatgtccaactgtcgcagatctgagacaggtccggtcaccgccttgatgcccaaacggcggcttacattgcggcgagttgccaaggacgtgtattttcgtcacactcctgtcgatgatctgtggtggtaggagctgcagctcttgatgggaggaaccccgatgcacgaacactctgcgcatgcggagcatgtctacacgtgcacgcagcgcgattcagccgcggcaagttcttccgtggtcgcctcctggcgccgctgcatcgccatgcaccagctggcgccggaagagcggcgcgcgccgctccgcctcatggatcaggagttcaggcaggcccgcgaacaatccgaacagctgatcgccaacgccaccgacgaactcgaccgcctgttcaccacagcgggcaaagccggctgctgcctgcttctgaccgaccgcgatggcatcgcgctcgagcgccgcggcgcgatcggcgacgacaaggagttccacgatctcggcctctggaccggctcggtctggaccgaagccagcatcggcaccaacggcatcggcacggcgctggccgacgagcgctcggtttcgatcttccgcgaccagcacttcttctgctccaacatcaagctcagctgcacgacctctccgatccgcgatcatcgcgggcagctggcggccgcgctcgacatctcgacctgccgcgacgacgtcaacgagatgacgctcggcattctcgcgcagatggtgcgcgatgccgccatgcgcatcgagatcaatctcttccgcagcgcctatgccggcgcccgcttcgtgatggtgccctcgggcaccaacccgaccgcggcgcttctggccgtcgatcgccacgacctcgtgctcggcgccacccgcgccgcgcgcctggcgctgaagctcgacgaccgcagcatcgccgccggcattccggcggccgatgccctgcacgagacccgcatgtccgacgacgaggatctcgtcgaggccgaacgcgcggcattgctgagggctctgacccgctccagcggcaacgtctcgcaggcggcgatcgcgctcggcatgagccgtgccacgctgcatcgcaagatgaagaagctcaatctgcactagggtcaaaactcaatcaggataggggttctgcaagctgtattttgtgtctgagtaggaggagaggtgcgggaaatgcccatcattttcaaacctttccgacgcccgcaggcacaaaatacagcttgcccgcagggttggcgatgacgggccgcctgatcgcaaccaatgctcgacaagaccagaaggtcttgccttgcgcttgtttgcttccatccaatcccgtcatcgtcaacaggacccctatcctgattgagttttgaccctaatcctgttgtaggcggcactgatgtagcagcgatgcgacactgtgcgctgcggtatcgccgggtgccgctatatcccgacacaaaagacgcgcagatttcctcccacgggttcgcgtccgaacctggctcatctcaagggaggatgacatgctgcatcagaaaatcgtcgagtcgccgttcaagctgaaatacgggaattatatcggcggcgaatggcgcgagccgatcgaaggcaagtatttcgacaacatcaccccggtcaccggcggcaagctctgtgaaattccgcgctccagcgaaaaggacatcaacgcggcgctcgatgccgcccatgccgccaaggacaagtgggcgcgcacctcggtcgccgagcgcgccaatatcctgatgaagatcgcccagcggatggaggacaagctggaagttctggcccaggccgagacctgggacaacggcaagccgatccgcgaaaccatggccgccgacattccactcgcaatcgaccacttccgctacttcgcctcctgtgtacgcgcccaggaaggctctatcggcgaaatcgacaacgacaccgtcgcctatcacttccatgaaccgctcggcgtcgtgggccagatcattccctggaacttcccgatcctgatggccgcctggaagctggcgcccgctcttgccgccggcaactgcgtcgtcatcaagccagctgaacagacgcctgcctcgctgctcgtctgggccgagatcatcggcgacctgctacccccaggcgttctcaacatcgtcaacggtttcggcctcgaggccggcaagccgctggcgtcgagcccgcgcatcgccaagatagccttcaccggcgaaaccacgacgggccggctgatcatgcaatatgccagccagaacctcatccccgtcacgctcgaactcggcggcaagtcgccgaacatcttcttttccgacgtggccgacgaggacgacgacttcttcgacaaggcgctggaaggctttgcgatgttcgcgctgaaccagggcgaagtctgcacatgcccgagccgcgcgctggtgcatgaaaagatctacgaccgcttcatggaacgcgccgtcaagcgcgtcgaagccatcgtccaaggcaacccgctcgacagtgccacgatgatcggcgcccaggcttccaacgagcagatggaaaagatcctcgcctatctcgacatcggcaagcaggaaggcgccgaagtcttgaccggcggctcccgcaacgacctcggcggcgaactggcgagcggctactacatcaagccgacgatcttcaagggccacaacaagatgcgcgtgttccaggaagagatcttcggcccggtcgtgtcggtcacgaccttcaaggacgaagccgaagcgctgtcgatcgccaacgatacgctctatggcctcggcgccggtgtctggacccgcaacggcaaccgcgcctatcgcttcggccgcgaaatccaggccggccgcgtctggaccaattgctaccacgcctacccggcccatgcggcctttggcggctacaagcaatcgggtatcggccgcgagacccacaaaatgatgctcgaccactaccagcagaccaagaacatgctggtcagctacagcgaaaagaagctcggtttcttctgagccttttcgacagcagggagggcatccgcaacacccctccctgcctctttctccacaagtcttccacgagcgaaaatgggctctatttgaagtcgtgcgtgtggccccctcatctccggtgcaacgcgttgcacctgacctgccggcaccttctccccgctggggagaagagactcatggccgacgcggcattccccttctcccctcggggagaaggtggcggcagccggatgagggggccacgaacgcatctggaggagagaaaagcaccgcatacggaggagaacgcaatggacaccacagtcaacggagaaccccgcgttctcgcaaccgacgccgccgttgccctgatcgacgagatcaggcgcgattatcccgacatcctcttccatcagtccggcggctgctgcgatgggtcttcgcccatgtgctatccggccgacgatttcatcgtcggcgaccatgacgtcaagcttggcgaaatatcgggcgtccccgtctacatcagcgccagccagttcgaagcttggaagcacacgcagctgatcatcgacgtggtggccggacgcggtggaatgttctcgctggataacggccgagaaaagcgcttcctcacccgctcgcgcatgttcggcggtggcgaggcctgcgcgatcccgggcgtgcagagagttgtctagtgcttgcgcaccttgcccgtcggaatggccgaagaggtgaccgaaaccggatcgctcgccgggaagctgtcctccagcccctgcgccagctgatcctccatctcgtccatgtcgccggcggcgcgagcgcttggctgtgcctcgccggcttccacgctcgagagcgcggtggtctcgtcgaaggatgccagttcgcccatgacggccttggcccggtcgatcgcgttgttcgacgtcaacgtccgatccatatccttgcgcaactgcacggacacgacctcgccgccctttccgacgaactcgaccgtaaatcctcgtctcccgccctgctccggaatgacctgcgtgccgatgacctgcatgaaatgtctcctttgcacatttgaggagacaacggcggccatccgacaaagttccgcgagacccgccccaccggcagtgcaagacggagcgccaccgcgcggccaaaaaaaagccaccgctcgtgacggtggccgtagtcatgaaggttcttaaaaacctccagaggggaacagttgcgtcatcgaccagcgaggccagccgactgcataagcaactataggtaatagtagccccctatcgtaaaaattcaatcaattggcggctgaatttatcgagggacgtaaatcatatttccagatccgccccaaaacgggggataatttaccactttcaggttgcaacccccctgaacccatcgacatcagcgctgcaccagggcggttgattcgcgcaggatcagctcgaccggccagagctcgtggatctccagcggcgatcggccggataccagctgcaggaccaaatccgcgcagcgcgtgcccgccgcgcgcatcgatgaccgcgtcgccgacaaggagggcgccatgttgtcggccgtcagatagggaaacacgtcgtcatgggcgatgacggagacctcgcggccgacctgcaacccgagcgagcgaaccgcgcgatagacccctaacgccgtcatcatcgagcccgcgacgatcgccgtcggcggattggcctgctcgagcagcgagcgggcgaagcgaaagccgagctcgtcggtaaaattgccgctggcgatcaactgtggatcgagttcgaccccacggctctgcagcgcgtcgcgatagcccttgtcgcgatgcagcgcataggtcgcgcccgggcggccgttgatcatggcgatcctggtatggccgagatcgatgagatgcgaggtcgcgcggcgcaccgcgccctcgttgtcgatgtcgagccaggcatgcggcacgtcgatatcggatcggccgtggaccagaaacggcatgccgagcctgtgcagcagcgcgatgcgctcgtcgttggggcgcggcgaatgcacgatgatcgcgtcgacccgctggctttccaccagccgccggtagagctgcatctcgtcgttatgatcggggtcggccatgggaatgacgagaatgtcggtgtcctcggccaccagcctctcggccatccccgccatgaactcggcgaagtgaaactcgcccgcccgccccatcaccacgccgatggcacctgcccgcccggtcttcaacctgacggcattgacgttcggccgatagccgagccgaacggcctcttccgccacgcgcgcccgggtcacttcgctgacttcgggatagccgctcagcgcgcgactgaccgtcgtcggcgacaatccgagctgttttgcgaactctctaagcttcatgcaccgacacgtctttcatcgcccgctattggatcgttcccacaccctataaggcaatccgtcgatatttggcacaaaatccgcatatcggccaaaccgatttcaaatttcgaccgccatccgtgtttgacgctcgacgttctccacatccatcgagcctcgcacccaattgtttttgcaagataaatcgctgctttggttcgaggcggacacctgaagaactacccgcttgacttgatatcgggcttctgacaactttttccaaccaaatcgttttcaaattagaggacgctatggttctttttgggaggaagatcatgaagtttcgtcttacgacggccgtcatcgcggccgcgctcatcggcacggccctgccgtcgctggccgccaacatcagcatctctgcaagctccaccggcaaaaacctcgacctgttccgcaagcagctcgacgccttcgaaaaggcgaccggcaacaaggtcagcatcgtcaccatgccgtcctcgtcgaccgagcagttctcgcagtaccgcctgtggctcgccgccggcaacaaggacgtcgacgtctaccagaccgacgtgatctgggcgccgcagctggccgaccagttcctcgatctcaaggacgccgccaaggacgtcgcgggcgatttcttcccctcgatcatccagtcgcaaaccgtcaacggccgcctcgtcgccatgccgctctataccgacgcgcccgccctcttctaccgcaaggacctgctcgacaaatacggcaagcagccgccgaagacctgggacgagatggcggcgaccgccaaggaaatccaggacaaagagcgcgaagccggccagaaggacctctggggctacgtcttccagggcaacgcctatgaaggcctgacctgcaacgcgctggaatggatcaagtcgtcaggcggcggccagatcatcgagaccgacggcaccatctcgatcaacaacgagaaggccgcggccgccatcgagcgcgccaagggctgggtcggcaccatctcgccgggcggcgtgctcgcctaccaggaagaagaatcgcgcggcgtctggcagaccggcaacgccgtcttcatgcgcaactggccttacgcctatgcgctcggcaacggccctgacagcgccgtcaagggcaagttcgatgtcaccacgctgccggcggccgccgaaggcgacaagccatcctcgacgctcggcggctggaacctcgccgtctcgaaatattcacagaaccccgaggtggcgatcgagctcgtcaagttcctgacgtcgaaggaaagccagaagcagcgcgccatcgagctctccaacctgccgacgctgtcagcactttacgacgacaaggacatcgccgccgcggcacccttcatgccgaactggaagccgatcttcgaaaacgccgtgccgcgcccctcggcttcggccaaggtcaagtacaatgaggtctccgccaagttctggaccgccgtccacaacacgctgtcgggcaacggaacggccgctgaaaacctcgagcttctcgaagccgacctgacgtcgctcaagggcgacaactggtaatccatcgatgcgccggcggcgggctttccgctgccggcgctccgaaggacgccatcgtcaatcgtctcaggaagcgggtatctcatgagtgaagttgcagtttctgaacgcctgaaggcgccggcgcgcgccagggccacctcgtcggacctgaaggccgaccgcgtccgttccgcctggatgttcctggcgccgacgctgtttatcctcgccgtcgtcgccggctggccattgttccgcaccatatatttcagcttcaccaacgcctcgctcaccaatctcggcgaagcccgcttcgtcggcttcgacaattatctcacctggatcacgctgaagagcggccgcaccgtctacaagggcctgctcgccgatcccgcctggtggaacgcggtgtggaacacgatgaaattcaccgtgctttccgtgctgatcgaaaccgcgctcggcctcatcgtcgcgctggtgctgaacgcccagttcgccggccgcggcatcgtgcgcgccgcgatcctgatcccctgggcgatcccgaccatcgtctcggccaagatgtgggcctggatgctcaacgaccagttcggcatcctgaacgacctcttcatggcgctcggcctgatcagccagaagatcgcctggaccgccaatcccgagacagcgatgacggctgtcctgatcgtcgacgtctggaagacgacgcccttcatggcgcttctcattctcgccggcctgcagatggtgcccggcgatatctacgaggccgccaagatcgacggcatcaacccgatcaaggtcttctggcgcctgacgctgccgctgatccgccccgcgatcatggtcgccgtcatcttccgcatgctcgacgccatgcgcatcttcgacctgatctacgtgctgacgccgaacaacgcgcagaccaagaccatgtcggtcatggctagggagaacctcttcgacttcgacaagttcgcctatggcgcgaccgcctcgaccgtcctcttcctgctcatcgccaccgtcaccgtgctctacatgtggctcggccgcgtcaacctcggcgggagtgaacgctgatgcttctcacagccacgaaaaacaccctcttctatctcctcgtcggcgtcatcgtcctcatcgcggtcttccccttttactacgcgatcctgaccagcttcaaagccggcacggcgctgttcgagatcaactactggccgacctcgatctcctttgcgaactacacgaacgtgctcaccacgggcagcttcatcaaaagcctcggcaattcgctgctgatcgccgtctgcgtcgtcgccgcctcgctgctgctcgccgtcaccgcatcctatgctctcgcccgtgtgcatttccgcggccgggcgctcctgatgctgaccatcctgtcggtctccatgttcccgcagatcgccgtgctggcaggcctgttcgagctgatccgctggatcggcatcttcaacacgccattcgcgctgatcttctcctacatgatcttcaccctgcccttcacggtctgggttctgaccaccttcatgcgtgatctgccgatcgaaatcgaggaagcggcgattgtcgacggcgcctctccatgggtcatcattacccaggttttcatgccgctgatgtggccggctttggtcacgacgggactgctcgccttcattacggcctggaacgaattccttttcgccctaacctttacgtcttcggacgcgcagcggaccgttccggttgccatcgccttgctatcgggcggcagccagttcgagattccgtggggcaacatcatggcggcatccgtcatcgtcacggtcccggtcgttgtcctggtgctcatattccagcgccggatcatttccggcctcaccgccggcggcgtcaaaggttgaagaaagcacgatatggcacagattagactcgacaatatcagaaagagcttcggcgctctcgaagtcatcaagggcgtcaccatggatatccgcaagggtgagttcatggtcttcgtcggcccgtccggctgcggcaagtccacacttttgagattgatctccggcctggaggacatatcggaaggcacgctctccttcgatggacaggcggtgaaccagctctcgccctccaagcgcggtatcgccatggtcttccagtcctacgcgctctatccgcacatgaccgtcttcgacaacatggccttcggcatgaaactgtcgggccgcaccaaggacgagtgcaaggcccgcgtcgagcaggcagccggcatgttgcagctctcgccctatctggagcgcctgccccgccagctctccggcggccagcgccagcgcgtcgcgatcggccgcgccatcgtccgcgatcccaaggtcttcctcttcgacgagccgctgtcgaacctcgacgcggcactgcgcgtcgccacacgcctggagatcgccaagcttcaccgcagcatgcacgacacgacgatgatctacgtcacccacgaccaggtcgaggcgatgacactcgccgaccgtatctgcgtgttgcgcgatggtgtcgtcgagcagatcggcacgccgctcgagctctacgaaaccccgaattccgtcttcgtcgccggcttcatcggctcgccgaagatgaacttcctcaccggcgcgttctccgcgccccatgacgcccacaccatcggggtgcgcgccgaacacatcgagatcaccaaccgggagcccgcctggaagggcacggtgatccactccgaaatcctcggttccgacagcttcgtctatctcgacatcggcacgccggaaccgctggtcgttcgcgaaaccggcgtttcgcgccaccagcccggcgacaatatcggcgtctcgcctgttgccggcgccatccaccgtttcgacccatccggacgcgcgctcgaaagggtccccttgaagggcgccgcctgaacccaacccaaacaacccggatcgcgaccgcttcccaccggtttcgatccaccacgcgcatgaaggagcatgaccttggctattcgcaccatcgtatggggtgaaaacatccatgaaaacaccaacgagatcgtccgcggcatctatcccgatggcatgcacacgacgatcgccaacgcgctgaacaccgatcctgatatcagcgccacgacggcgacgctgcaggagccggaacacggcctcaccgaagcccgcctcgccgaaaccgacgtgctgaactggtggggccacaaggatcacggcgccgtctccgacgtcgtcgtcgagcgcgtcgccaagcgcgtctgggagggcatgggcctgctcgtcctgcattccggccacttctcgaagatcttcaagcgcctgatgggcacgccctgcgcgctgaaatggcgcgaggccggcgagcgcgagcgcctgtggaccatcaaccagcgccacccgatcgcggccggcatcggcgagaacttcgtgctcgagaatgaagagatgtacggcgagcagttctccgttccggagccgctcgagaccgtcttcatctcctggttccagggcggcgaagtcttccgctcggggctgacctggcgccgcggcgccggcaacatcttctacttccgcccgggccacgagacctatccgacctaccacgacgccaacgtccagaaggtgctgatcaacggcgtcaaatgggcctataatcctgagggcgacctgaaaagcatcaccgatgccccgaatgtcccggtcgagaaggcgctggagccgatcaccgaacgcggcccgagactgcaccaggccggcgaagccggttaccgctgaggagaagagcaatgcgtctactcgttcttggcacgggcgtcatggccaaaaaccaggtcgccaactttctcgcgatcgatggcgtcgaggttgtcggcgccgtcgatacggatctcgcacggctgaccgaattcgccgatcacttccatatcgaaaagcgcttccgcacgctggaagaagcgatcgactggggtgagttcgacagcgccaccaacgtcacgcctgatcgcatccactacgcgaccagcctggcgctgatcgcggccggcaagcacgtcttctgcgaaaagccgctggccgaacattacgaccacgccctggagatgacggaagccgccgaagccgccggcgtcatcaacatggtcaacctgacctaccgcaacgtcgcgcccctgcagcgcgcccgcgagatggttctggccggcgaactcggcaccatcaggcacgtcgaggcctcctatctccagagctggctcgtctcccgcgcctggggcgactggcgcacggaatcgcgctggctgtggcgtctatcgaccggccacggttcgaacggcgtgctcggcgacgtcggcatccacatcctcgacttcgcggcctatggcgcggcgaccgatatcgaccacgtcttcgcccgcctgaagaccttcaacaaggcgccgggcggccagatcggcgagtacctgctggatgccaacgacagcttcaccatgtcggtggatttcaccaacggcgcgcttggcgtcatccatgcgacgcgctgggcgacgggccacctcaacgagctgaagctacgcatctacggcgaaaagggcagcctcgaggttacccatcgccccgatggctccgacctgcgcggctgcttcggcgacgacatcgaaagcgccacctggcgcgacatcgaggtgccgccggtcttgaccaactatcagcgcttcgccgaagccgtgaagaccggcaggcaggacgaccccaccttccgccacgccgccaacctgcagaaggtcatcgaccttgcgatcgtctccgaacgcgaacgccgcgaactcaaccttctggccgcacagcaacaggacagcacccccgacaagcgcatcccgccgctgacggtggtggtgtaggggtagattgatgatgcggggcccgcgaaagcgggccttgctattgggtggcggcaaacacccgatgacggcgatggcccgaagcacacggcagaaatcagccgtcaccagccaccttgtcgacgtcgaggctgacatatttatcgagatgcctgagccatttgcgttcgatagcagtttcgatgtcgatttcgttggcgcgcagatagagaacgaactggccaaacaggtctgccgcttcgttttccagtgcttcgcggctgccgcctgaaccatccgcatttggcttcgccctgccggcaatcaaaagatgttcggccgtcagttcgcccagttcctccgtcagcttcagaagataccagtccgcgttacgctcgatcttatggacccgcgcataaagctcgccgacctgcccgatccggtcactcaactccctgaatgtcgcgctcattctgtcctcgatggctgtagacggactcgtaccaggaatggttaccgatgatttgcgacacaacaactacgatagccgcgaatcatccagcagtgatgccagctggcccgttcggtcattgaacctggggcaaccgatgcccaaattcagctcatggaaaaaatccgaatgcgctcatatgcattctgagtatcgtggggctcatcctcggcggctggttgggctatcaactcgctggtccgattggcgttgtggtgttcgttccgctcggcgctcttgccgggttgattgtcggcgtcctcaactggcgactgatcctacttctgggctgaccgcgatgcccccacgcgtctctacgacaatgcccagggatcaactccatccaccacgccgcgccattcatcgatagccgaggaaacatcggccgaattccggatacgccaaacacgcagtcccgggttcgcggcaagctgtgccgaaatcttcgttcgaaaattggtgcggttcctgatgctgcgcatggcgaatttgtattgctgccatggccaatcgacattgccttgcggcaattctttacgcgttcgtccgatgttgcgcagcggtcttgcaatgagccgccaggctcttagccactcgggaggatccatccacatgacgctatcggcacgattgatcgcgaaaggaagcagactggggccaccctcgataatccagctgtcggcctggacggcgcgtgacagatcggcctcgatcagagcccgggaacgctgccgccaatggctcgtcaacttcatggcatcaaaggaaataaccggcacatccgggcgtaccgccgccagccgcgcggccaggtggcttttgccagctccgttggggccggttatgatcaaccttttcagcatcgctgtcccacgaagaagatcccgttcgacggcggcggtccgagcgcaattcgcccccggcggcgccaccctgccctagctgtccgtctcgtccgtcttcggcggggcgctgaagaggtttttcaaggcgctggtcttggtcttctgcgccttgctgagcttcagcgcccggttggcggccttggcctgttccagcatcatctcgatctggatctgctggatttcggtcagccgctcccactgccggttgagcagatggtcgaccttttcgtgcaggtggcggatttccagttcggccttgaggttgaccttgtagtcgttgagcgcgcgcaggcggtccttcgattcctggcggcgctggctcatcatgatgatcggcgcctgcagggcggcgatggtcgacaggatgaggttgagcaggatgaagggataggcgtcgaacgcctctcgctcgcccatcaggagattgatgcccatccagaccgcgagaaacaggcagaaggagatgatgaacggccagctgccgccgaaggtggcgacgacgtcggcgacgcggtcgccgatcgagcgatgctcctcgtaatcctcttcgatgttttcggccagcgtgtcgtggctcttcaggctctccaccacctcgtcctcgaggttggagagctcgccgcgttcgtcgcgcagcagttcggcgatgtactggccgcgataatcgtccaccaccttgcggttgatgtaatcgtcggaatgcagacccgggtgcttctgccgcatgaaatcggcaagcgaagggcgaaggtcgtcgaagtggatggcgtcctttttcttcagggcggtgccggtgatcgcatcaacgaggcgcacggacttcgccttggcccgcgccaggctgtcgctatagtccttcatctcgacggtggccgcctcgccgccgtgtccggcatcgaaatccacgatcccgcccgcgaaatccaggggcttttcttctgccatccgacgatcctctgtaccgattcctgcgctctaaccatcgaatcgcacaggattgtgacattgccgggcgatccgggcgaggccattcgtgggccagggtgaatgaccggctgcgctgcccttcgcgacaacgcaagcgccttctaaaacaagccgcttacggactttcacctgccccgattaacggcatcaaaagctttccgtcctagcctgaagccatgacttcgagtggacttcgaaatagccttccggcggcccttctgttcctggtgatgctggtgcaattcagcgccgcatcggctgccccggcggattccttcgagacacgcagttcctgctgggcgtccgccaacctgtcggaggacgcggtggcgatcgccaggagcccggaccgatggtcctgcggcgatcaggcccgctccatcgatgccgagcgcgtgctgcttcgcttcgatatcagcgtcgaccaacctcttccccgatatctgctctccaggcgcgcggcacttcaggcgatccatctgtttgcaatcgaccgggatggcacggtgcgccagaacagcattcccgccgcggccctccaaagctccttggccggcggctacttcaaggcgcccttgcccgatgtgaccagtgagacgcggcaggtgatcgccgcgatcgacctcccgtgccaccggatgacgctggagcgcgcctatctcgcgccgacggatgccgccagcggcatcggcgacatgcgcttcctgcttgttctggcagggcttgccggcatgctcgtcatgccgctgatcttcaatgcggccttctaccgggcgctgcgcgaacctttcgttctctggcattcggcgctgacattctcgctgctgatgaccattctggtgacatccggcctttcggtcatgctcttcgatccgccggcgatgaccttgagctggatgacgacggtgatcttcggcatgaccatcgcatcgggagcgatgttcacctatagcttcgtcgagcccggcctgatgcatccgctcctacgccgcgcgctcccctattgcgcggcatgggcgatgttgctgagcgtttctcacgccgccttccccttcgtcgcccgccccatccagtcgagcgcatatacggccgccttcgcgccggtgctcgccatattcatcctgtcgatgatcgatgcgctgcgccggggaagccgcgccgcccgtttccaggcgatcggctacgcgccgatggtcgtggttggattgatccgtctggtgacgggcgtcgttccctggctgcaaagcaccgacgccaccctgctcttctacatcggctgcatgtgggaggtcgtgttcaccacgctcggcgtggccgagcgcttcgtcaccatgaaacgcgagcgcgacggcgcccgcaacgacgccgagctgcttgaacgtctgtccgaaacggatccgctgacgggattgctcaaccggcgtgcgatcgaacaacaattcgagcaattgcgaacagaaggcttcgcagcccttgccgtcattgacatcgatcatttcaaggcgatcaacgatatcaacggccatagcatcggcgacgaggtcctgaaggccgtcgccaatgcgctgcagccaggcccgagcgtgcgcgcctaccgcctcggcggcgaggaattcgtgcttctcctgcgtggcgacgacgccgacacccaggccgaactccgccgccaggccattcccgccatcgtcgcccgcacggtgcccggcttcaaacggacggtgaccgcaagcatgggcgtgacgggtattctcggtgacgaggatttcgcgaccctttatgaacgggccgacaagctgctctacgaagccaagagcgcgggccgcaatcgcacccgtggcgcgatcaacaggacgccgacgccgcgtgactttccggatgaccgggcgatgatcgcctagatcaacccgcgcttggctatcacgtcacgaacggcatgatatccacgccatcgccgggaaagacggtgatatggggatgatcgaggaaaagccgtgccgcggcctcggcattctccgcctcgaccaccagatagccgcagagcgcattggaagcctccgagatgccgtccttgttgacccgcgtcgtcttccccaccatgccgccgcgatcaaggataaccgcagcattccgctcctcccatgccatccactgcggcacacctttggcatcgatggcatcttgcccggctttcggaaggcgccggaaagcatcgaaatcctcgtgtttcatggtgtagacggcaagaaatcggggcatggtggacctgtgtgatgacgcgtcgtgtgctcgaacatagcatacggctgtgaggtgcctaaagagaggttttgcggtgtggcgcccccctctgccctgccgggcatctcccccacaggtggggagatcgactcgtggcctgctccccaaccaaacaatgagccttgagcgagcggatgcgcccagccaatctccccacctgtgggggagatgcccggcagggcagaggggggtatcccagggcgccgcgtccaatctcaggcgccccaccccaaaaacaaccctagcgcaaccgctccaccaaccgcccgatcgacaccgcatccgcattggcaaacgctaaccgcagataccgctcctgccccaccccgaaatagctccccggcaggcagacaacgccggcctccctggccagccgctcggcaacggcggacgagctcatgtcttcgcacggatgccggatgaaggcgaaataggcgccgagcgcgccgatctcccagcccggcagctcagccatcaccgcccgcagcgcatcagcccggcgcgcgatctcaaggcggttttcggcccgccagccggcgagaacgggcatcgcatcggcgactgccacctgcgccgcccgtggcgcgcagatctgcatgttgtccatcaccttggtgatctcggcgatgacgccctgccccgccgtgatcgcgcccagccggtggccgggaatgcagaaggatttggagaagctgtagagcaggatcagcgtctcctcccagccggggatagcaagcagcggatgcggcgcgccgtaggtctccggcagaaagtcgcgataggtctcgtcgacgatcagccacgccccatggtcgcggcagagatcgaagagggcgcgcaacagatccggcggatagatcgcgcccgtcggattgttcggcgtcacgatcgccagcaccttggcgcccgaggccagcgccttttcggccgaggcgatatccggcaggaagccgttcccggcgtcgcattcgaccagcaccctgttgatcccgagcatcgacagggtcgtttcctggttgaagtagaagggattggtcagcgccacgctgtcccccgccccggcaagcgcgatggccgccgccatgaaggcctggttgcagccggcggtgatgtggatgttatgggcggcgaccggcgcgccgtagacctcggacatctgccgggcataggcctcgcgcagcacgccctcgccctcgatcggcccgtagcccgtcgtcgccggcgatgccgccgcctcgcccagcagccgcagcatctccggatgcgccgggtagcccggaaccgcctgcgagagatcgaccagcggccccttgtttcccttgtattcgcgtgcccaggcaagcaccgaggggatgggcggcggtgagaggcgggatacgaggagattggcttcagcggcgggcatggaggctctcaaatcgatgatggaaaccatcactcctgcacaaaacaccccgcctcggcaacacgcattcgctgaacgcgcgccagcacgccgtcaggcgtcaaaacaagacagcgcgacgtcaggcgccgcagcaggctttgagccttgcaagcttcggcacctcgatatgccggttggcgacgatggaaatcaccccatccgccttgagcttcgacatctgccgcgacaccgtctcgatcgtcagcccgaggaaatcggcgatatcggcgcgtgacagcggcaggtcgaagcggcggctctggccggcggcttcgggatcgagatgcgtcgcgatcagaagcaggaagctcgcgaccttctccgccgccgtcttgcgccccagcgtcaccatccagtcgcgggcttcgtcgagctcgcgcatcgtctggttcatcagccgttcggcgagcgccggcgtgctcttgaccagccgctccatggcggccttcggaacacggcagagatgaacgtcggacgcggcctccgccgagacgccgttttcatcggcatgcaacctcccgaggaaatcgggcgcgaactgcaggccgacgatctgctggcggccgtcttcgagcgtcttcgtcagcttcaccacgccgctgatgacggtggcgtaggattcgacgggcatcttctcgccggccagctcctccccggcgtcatgggtgacaagccgcgtatgggcggaaagagacaggagttcgtcggccgtcagcgccccgcacatccccttgtggcggacctcgcagctgacgcaacgtactggaatattagaattatggatatcttttcgcatagacccggctccacccggaccatagccaaggccatcgtcggagaacagcggtttcttgatcgagatcaaggcagtcatcgaaaacccccattattccccgtcctggaaaggacacccccatgaccgccgatctcatcgcccgctattccgcccccgtcccccgctacaccagctacccgaccgcgccgcactttcacgagggcatcggcgaggtggattacaggcggtggctcgaagcaagttcacaaggcgcactatcgctttacgtgcatatcccgttctgcgaccggctctgtttctactgcggctgccataccaggcaggtgcgccgctacgaccccatcgcgacctacctggaagccttgaatagcgagatcgcgctcgttgcaaaacatctcccgctacggcgaaaggtcgcagccatccatttcggcggtggttcgccgacgatcgttagccccgatgacctcggccgcctgcgcgccacgctcgatgcccatttcgagatcggtccggagtgcgagatcagcgtcgagatcgatccaacgcatgtggatgccgacaagctcagggcatggcgcgatctcggcatgacgcgggcaagcgtcggcgtgcaggacttcgcacccgtcgtccaggcatcgatcaaccggccgcagagctttgacgagacggcgatggtggtgcggacgttgcgcgatctcggcatcggctcgatcaatctcgacatcgtctacggcctcccccatcaggaccgcgacatgctgctgcgaacgatcgagctgtcgctgtcgatgcagcccgatcgcatcgccatgttcggctacgcccacgtcccctgggtcaagaaacaccagtcggtgatcgacaccgccacgcttgccggcccggtcgaccgcttcacgatggccgcggccggcgctggcgccatcctcgccgccggttacgacgccgtcggcatcgaccacttcgcgagacccgacgacagcatggcccgcaagctgcgcgacggcgcgctcaggcgcaatttccagggctacacgacggatggcgccgatacgctgatcggccttggcgcctcctcgatcggcaagcttccacagggctatgtccagaacatcgtcgcgacgggacaatattgccggtcggtcatggaaggccgccttcccgtcgcaagaggcttcgcgctctcggatgccgaccgcgccagcgcttgcgcgatcgaggcgctgatgtgccaatacgccttctccgtcgcggagctgcgcgcgcgcttcggcggagccgccgacgatgcctgcaacgacgccctgcatgcgagcttcaacgaggacggcttcgtctccttcgacggcgacaggttctccatcaccgaggaaggccgcccattcgtgcgcaccatcgccgccaggtttgatcgctacctcgatcggggcaagggcaaacattcttccgcgatttgatctgaatcaataagcccggccgaaaacctgattatcgtcagttccggcaccaattgtcgcagccccggctcgccgattgtcagtcgtctactgccagttatagtaatttcagaaatttctgaaatcacagtcataacgaaagcccgatcatgaatcttgtgccgctcgtccaatccttcgtcctgcacttcggtgaaatgggctcgcgctggggtatcaaccgtacggtgagccagatctacgcgctgctctacgtctcgccccagccgctctgcgccgaggagatcgccgacgcgctcggcatttcgcgctcgaacgtctcgatgagcctgcgcgagttgcagacttggaacctggtgctgctgagacaccggccggacgatcgccgcgactttttcaccacgccggacgatgtctggctgatcctgcgcacgctcgccgaggagcgcaagaagcgcgaggtcgatccgaccctctcgatgctgcgcgagatcctcatgcagaagccggccagcgaagccgagcgccacgcccagcaacgcatgggcgaaatgcatgcactgattgaacagctgacacattggtatgacgatgtgaaacaacttgaaaccgaaagactggcgacgctactctcgctaggcgcgaaagtgacgaagctgctcgaggccaaggaccgggtcatctcgctcggccgtggccgccgtcccaatcctgcgaacaagagttagcgccatgaccagtgcctatctcgatgccacgcatgacaagaccaggaaggcacggcgcaggcgtgcccgtcagcccgcgggccttcgaaccgcggccctgatccagacgctcgccgccctcctctggattccgcaggccggcctgctgtcgatcgcggtcggccgcatcgccgatggcggcggcctcgatgccgcaatctggccggcggtcgccattgccttgctcggcgtcgcgaagagctgtctcgacgcggccgggggccggcttgcctttcgcgccgcgcgggttgaactgacgaaaaggcgggtccgcgccgtcgaggccctggcgcgccgctcgcccgtcgacagcacccgccacacatccggcgaggccgccagcatcgtcggcgagcaggccgaactgatcgtgccctatctcgcgcgtttccagcccggccgcttcaaggccagcgccgtgccgctcttcattctcgcctgcgtcttccccatctcgtggatcgcggccctcgtgctgctcttcaccatgccgctcgttcccgtgttcatggcgttgatcggctggcgcgcgcaggcggccagtgaaaggcagctccaggcgactggcggcctcaacggcttcctgctcgaccgcctgcgcggcctcgccaccatccgcgcccttggcgccgtcgatgccacggcgacgcgtctgcgcgccgatgccgaggacctgaaaacccgcaccatggccgtgctgcgcatcgccttcctgtcgtcggcggttctcgagctcttcgccgccctgggcgtcgccatgctggccgtctacgtcggcttctcgctgctcggccagatcaggttcggcgcctgggccagcggtctcgacctcacatcgggcctcttcgtgctcttgctcgcgcccgccttcttcgagccgctgcgcgaactctcggccgtctggcacgaccgcgcctcgggcgaagcggcgatgaaggcgctcgatgcgctgagcgaggacggcatgccgctgccgcaagccgaaccggctcccggcacgcttggcgccgacatcctcttccatgcggtcggctttcgctatcccggcagcgacatatccgccgtcgagaatttcgaccttcacatccgcgccggcgagcacgtcgccctgctgggcccgagcggctccggcaagtcgaccttgctggcgctcgccgccggtctcgctccctgtgaaaccggtcagatcgagatcggcgggcaaccggccggccaggcgtcgcggtcgcggatcgcctggatcggtcagaagccgcatatcttcgccggcagcatcacccgcaacgtctcgctcggccggccgcacgtctccgctcaacaggccgcggccgctctcgatgccgcccacctcggcaacctcgcgagcgcctaccgcaaccgtccgctgggcgacggcggagccggcctttcgggcggcgaggccctgcggcttgccatcgcgcgcgccgccgccgacccgcgagcgctgatcgtccttgccgacgaacccaccgcccatctcgatatcgcgacggccgacgacatcaccgagagcctgctgatccttgccaagggcaggaccctgctcgtcgccacccacgatccccgccttgccgcgcgcatgggcaggaccatccatatcaatccggaacccgcaagggaggccgcggaatgagcgcgtcgctgaccgatctgaaaccgatcctcaagctcttcgtccgcgagaagaaacgcggcctgctcctcggcgccgtcatgtcggcgacaacggccgccgccggcgtcgcgctgctcggtctctccggctggttcatcacggcaaccgccattgcgggcacggcggcagcgaccgccatcaccttcgatgtcttcgctccctcggccggcatccgcctgctggcgatcggccgcacggcctcgcgctatggcgagcggctgacgacgcatgacgcgacgctgagcgttctcgccgccttgcgcgaacgcctgtttcgcggctgggcgaaggccggcgccgcccgcgatctcgccagacgcccggcccgcctgctgtttcgcctgaccggcgatatcgatgcgctcgattccctctatctgcgcgtgctggtgccggcgggcgtcgccatcctggccgcgctcgccaccggcatcgcgctcggcctgatgcatcctctcttcggcctctcggcggcgctgcttcttttcgccgccggcctcggcatccccctttgcgccggcagacttgccgccgcccacgcccggcgccgcgcctatggcatcgaggcgctgcgcgcgcgcaccatcgacctcgtggccggccagtcggacctgctgatggccggacggatcgacgagcaggcgacagccatatcggcagccgaccgctatgcggccgatgccgacgaccggctgaaccgcatcgagagcatcgtcaccctcggcttcggcgccgcctcgacgctcctgctcaccggcgcgttgctggccgtatcagcactcgcgggcgccggtacgatcaccgccccggttgccgccctcggcatcctgatcgccttcgccgccgtcgagcccttcggcgcgcttcgtcgcggcgcgctcgaactcggacgcacgcttctggcggccaagcgcatcggtccgcgcctcaccgatgagcagccggcgggccggcacgcagccccttccaccgaattcgcgatcgaactcgccggtgtcagcgccgcctatgacgcggccgcgacccccgtcctcgtcgatatcaacctcaccttgaaagcaggcgagaagctggcgctgatcggcgccagcggcgccgggaagtccacgctgctggccctgctcgccggcgagatcgcaccgcttcacggcatgatcgccaacgacgcgggaacgctgatgacccagcgcaccgagcttttccaagacacggtcggcggcaatctgcgtctggcccatccgcgggcgactgtcgacgacctcaaggcggcgctcgccgccgctggcctgctggccgatatagtcgcgctccccgccaatctcggcacccggctcggcgaaggcggcatgggcctttcgggcggccaggcacgccggcttgcgctcgcccgcctcttcctgcgcgacacgcggctctggctgctcgacgaaccgacggaaggcctcgaccgcgccaccgcgcgagatgtcatggcccggttgtcggagaaggcggaaggccgcacgcttgtcatcgccacgcatatccgccgcgaggcggagatcacggatgtgatcgccacgctcgatggcggccgcatcgcaagcatttcgcgccgcggagagacggcgttcgaagacgctctgaaccggctgagaccggactgagcaatgcatgaccgccaggcaatcgggccggcggagaatcttcgtacccccatggggctgggagaaagacaatggaactagacatcgtcgatttatcgcgttttcaattcgcgctgacagcgctctaccactttttattcgtgccgctgacgcttggcctctccgtgctgctggccatcatggagaccgtctacgtcatgaccggccgccagatctggcggcagatgacgaaattctggggcgtgctgttcggtatcaacttcgccatcggcgtcgccaccggcatcgtcatggaattccagttcggcatgaactggagctactacagctactatgtcggcgatatcttcggtgcgccgctggcgatcgaagggctgatggccttcttcctcgaagccaccttcgtcggcctgttcttcttcggctgggacaagctctccaaggtcgggcacctgatcgcgacatggtgcgtggcgatcggatcgaacttctccgcgctctggatcctcgtcgccaacggctggatgcagaacccggccggatcggcgctcaacccgcagaccatgcgcatggaagtgaccagcttcttcgacgtcgtcttcaacccggtcgcccaggcgaagttcgtccacaccgtctcggccggttacgtctgtgcctccctcttcgtgctgggcgtctcggcctggtacctgctcaagggccggcacatcgagatcgccaagcgctcgatgacggtcgcggcgtccttcggcctggcctcggcgctgtcggtcgtcgttctcggcgacgaaagcggctaccgtgcaaccgaaaaccagaagatgaagctcgctgccatcgaagccatgtgggaaacggagccggcgccggcggccttcaccgccatcggcttccccgaccaggaagcgcgcgaaacgcacttcgccgtccagatcccgtggctcatgggcctgatcggcacccgctcgctggataccgccattccggggatcaacgaactcgaggaaggcgcgaagacccggattcgggaaggcatcaaggcctacgacgcgctgatgcaaatccgcgccgccggctcgcccgacaagatcacgcctgaaaacaggaccacgttcgagacgctcggccaccagctcggctatgcccttctcctgaagcgttatgtcgacgatccccgcaccgccaccgatcagcagatcgaacaggccgcccgcgacaccatcccgaacgtgccggtcctcttctggtcgttccgcatcatggtcgggctcggcgtcttcttcattctgctgacggcgaccttcttctggctgtccgcccgccgacgtctcgatgctcatccttggcttttgcgtatcgcggtcttttcgataccgctgccgttcatcgccatcgaaatgggttgggtggttgccgaggtcggacgccagccctggatcatcgagggcgtgctgccgacggcggcggccgtctccagcctcggggccagcaccgtgctcatgaccatcatcggctttgccgccctctacacggtgctcatcatcatcgagatgacgctgatggtgaaggccatcaagaagggcccggaaccggacaacgagccggaagccgagcttatttccgaaaccctcgttcctgccgcggagtgatcgatcatgatcctgcacgaactcatcgactatcaaaccctgcgcctgatctggtggctgatcctcggcgtcctgctgatcggcttcgccgtcaccgatggcttcgacctcggcgtcggcatgctgctccccttcgtcgccaggaaggatacggagcggcgcgtcgccatcaacacgatcggcccggtctgggaaggaaaccaggtgtggctgatcctcgggggcggcgccgtcttcgccgcctggccaccactctacgcggtctccttctcgggcttctacctcgccatgttcgccgttctcctggcgctcatcctgcggccggtcgccttcaagtaccgctcgaagcgtgaaagcgcccgctggcgcggcaattgggacatcgcgctgttcatcggcggcttcgtcccgtcgctgatcttcggcgtcgccgtcggcaacgtgctgcagggcgtgcccttccgcttcgatccggccgacatgcgcatcttctatgaaggcaccttcttcggcctgctcaacccctacgccctgctctgcggcctgctgtccgtcgccatgctgaccatgcacggcgccgcctggctggtgctgaagtcgagcggtccggtggcggagcgcgcccgcggctatggcagcgtcgctgccctcctcgtcatcgtgctcttcgcgctcggcggcgtcttcctggccttcggcgtcagcggctacacgatctcgagcgccatcgtcaccgatggcccctcgaacccgctgttgaagacggcggcgcaggacggctcgtggctggccaactacgccacctatccctggatgctgatcgcacctgtcgccggcttcctcggagcgatcgccaccctgatcgccatccgcgccagactggaaatcggaacgctgctgttcagcaaattgtcgatcttcggcatcatctcgaccgtcggcgtctcgatgttccccttcatcctgccctcctcgatcgacccgaagtcgagcctgacggtgtgggatgcgtcatcgagccatctgacactgttcatcatgcttgtcgtcacggcgatcttcctgccgctcatcgtcgcctacaccgcctgggtctacaaggtgctctggggcaaggtcgacgagaagcaggtcaccgacaaaagcggtcacgcgtattaaaggagaaatggcatgtggtatttcgcatggatccttggtctgccgctcgcggccgccttcgccgtcctcaacgccatgtggtacgagctggtcgacgatgaaaccaagaaaaagaagaagtcctgaatgacaggataacgaaaagaggctgcgctcgatccgggcgcagcctctttcttttcatgcatcgaaatgaccgtcagtagctcgccttgacgaagatatcggccagcgcctcgatccccgcctgatcgtcggcatcgaagcgcgaggcaacagggctgtcgagatcgatgacgcctaaaatctcgccgtcgtggcgcagcggcacgacgagctccgagcgcgaggcggcgtcgcaggcaatatggccgggaaaggcatgaacgtcctcgacgaggatcgactggccctttgcgaccgccgttccgcagaccccgcgcccgaccgcgatccgcacgcaggcggtgcgtccctggaacggcccgagcaccaactcctccttcgacttcaggaagtagaagccggcccagttcagctccggcatcatctcgaacatcaaggccgaggtattggccgcgttggcgatcacgtcacgctcgccgtgaagcagccccgccagctgctggccgagctcgcgatagaattccgccttgtcggcctgatcgattttcgccgtttgaaacatgtccgttcaccttccagcaatgcgtagcgctcgtcaggcctgatatagcgatccgcccggcacttgccaattccaccgccgtgcaggtgtcgcgggcatcccccgtcgcgaattcacggcggcctcttcaaattcacggcggattgacggacgcgatcttgtccaccggcgatcgggccatatgtccataatatgtcgatcggattatccggcgctggcggccgccagcggcatccgtccggcgaatgcagacgcgaaaaggccgtgctagccaacgggcttgcaaggctgttgcgaggttatgccatcgcacaacgccagcgccgtaattgaccggcaacgatagaaccatccattttcagttcgaggtaaagacaatgacaccggaagacagacaggccgttttcagccatcgcgagattgccgcggtcattaagggaataacgctcgatgatggcaccgatgcgccgataacgggcaagtcgcttggcgaagccatccttttcgtatccgaggaagcctccaccaatgcatcgagcgcgcacgtgatctacggcgccaacgaatcgctgagctacaccgattgcctcagcatctatcgcgattacggaccggcgctccgacgcggctccaactgagctgatcggataatgaagcgtggtggcggatcgccgccacgcgagagatggcgtggcgcggcaatcacaccattggctttaagaccggcgcgacgtgctgcgcaattgtgcggggcagcattctgaactataccgcctctggtcggcaacgatgcttccgacgccccaagctctcttcaaatcgaaaccgctcccatgactgctctccattcgccagcgcgcggcgttctcatcgcgttcgccgcctatgccgttttcgcgttcagcgacgcatccatcaagatcctccacggcagcatcccttcctacgagatcgccttcataggcgcgctcttcggcaccgccgccctgcccttcatcaaggccaaggaggattcctggcttgatatcgtgcgcaccacgaaccgcccgctctggcttctgcgcttcgtctgcggcgcggtcggcgccattgcctcgatcatcaccttcacgctgctgccgatggccgaagccttctgcctgctgttcctgctgccctccttcgtcaccatcctctccgtcatcttcctcaaggaagacgttcgctggcagcgctgggccgccgttatcgtcggcttcctgggggtgctggtggtcttgcgtcccggcttccgcgaactgtcgatcggccatctcgccgcggcgatcggcggtctgtcggcggcgatctcgatcgttgtcttgagaaagatgggaccggccgaaaagcgcctgtcgctttatggagccgcactgcttggcaccatcatcgtcagcggcgtgctgatgatcccgcaattcgtcgtgccgacaccgcggcagtggctgttcatcgcaagctacggcctgctcggcgccgccggcaacgtgctcttgatgaccgccgcgcgcatcgcccccgccaacctcgtcgcgccgccgcagtatagccagatgctgtgggcgatcgccttcggctacctgatcttcgacgacacgatcgacctgccgatggcgggcggcattctcctgatcatctgctccggccttctcacgcttgcccgcgaacgcaagcgcggcacgccgttgccgacatccgtcgtctcctccgacagccaggcgccgctcgcgacctccgctgccggcgagagcgcaaccgtgccgaacgcctgaccggcgtcgtcgcgcaccggacatcaccccaaaacgcaaccacccctgcccgcgtctccacgcaggcaggggtggtttcatttcagacgatggaaggccggtccgtcagcgcaggacagggcaaccgcgaacgttgccgaaggtgatctcgtcgggtccacgacgcgtgaagccctgcacgatcacccggcgcggcgtgatatccacgacacgcgcgcggcggaaaccgtagtcgctcgccttgtcctctgccagacgcggatcgcaaccgcgcggccggccgccataatacggcggcggaggcggcgggcggccgtaaaccggcggcggtggcggccggccgtagcccggaggcggtggtgggcgtccatagcccggatgtggtggcgggcgaccgccgtctatatagatgtccacctgagcggatgccgggaccgtggcgccggcaagcgtgccggcgcccagtaccagggcaatacccgccttggtcagaaactgcatcatcgaaatctccatatcgcgcggttgcgaccgcgctcctttttcgattctctcggccggtaggaagaacgacctgccggataaacgcattgttatgcgattcgcacaaagcaggctgaaaatggcactcccaaggcgatgtcatcgcttgagttcgccgggctcatcaaggatggatcaacggcgaatttccgggcaaccgcgaacattcgcgaagtacatgcggtcccaatagccgcgatagccgcggccggaaacgatgacccggcggggcgtgatatcggtaacgcgcgcattgcgcagaccggcgtagcgggccttctcgacagcccgaaccggcgagcatgcgcgagcgggcgccgggcggtactgaacgtcgatgatcgatgcacgctcgggaccggcggcggcggcaaccgaagtcgtcgcgggaatggacgcgagcgcgagaatggcggcaaacgaagctttggcgataaaacggttcatgatcatactctcattgcttgtcgatggtctcccttgcgggattggacaaacgataaacgcctgaaaatgaacgatgttcgaaccggccgttcacatctggttcagttgccgagatgcagcacgacctcgcgccgatgcgggctttcgcgatgttcgaacagatagatcccctgccaggtgcccagtacgagccttccgtccatgaccggaatcccgattgaaacctgcgtcagcgcggccttgatatgcgcgggcatatcgtcgggaccctccatcgtatgcacgatccagcgcatcgacgggtcggacgacggcggcaccagacggcgaaagaaaccgttgagatcggtccgaacatcgggatcggcattctcctggatcagcagcgagcacgatgtatgccgcacgaaaacagtgagcagcccggattcgatgtctgcggaacgcacgaacgcagcgatctgatcggtaaactcataaaggccctgcccgcgcgtctgcaggcttagaatcttttgtggcatggcagcacctccggacatgaactccgcccagaggtcgcgcgcacccgccgtcctgtcaatgccggtaatcggtccgcgtcaaaaccaaagcagcggaacgaagccaccatagatcatccgcttgccatcgaagatatcaaggcattcggtgacctgcagttcaggatcggccatgaccttcgcattgatctcgtcgcgttgttcgcgcgaatcataggtaatccacgaaaacaccacgacctcgtcatcggtcgcctggaccgcccgtggaaacgacgtcagctcgccatagggcacgtcgtccgcgacgcattcgacataatccctggcaccgtatgatttccagatggcaccggccttggccgagagcgccttgtaggcctcgatattcttcttcggcacggcaacgataaagccgtcgacataggacatgatgtctctcccttgaacgttggcatcgcttcaaggacgaacaaggcgggcctgaaccgacacacctttgaagataggcgaaatgccggattcgcaagacggtggattgaccgcgtcagaccgcgtccgcgcgatcaccctcgatcgcggcgttgaaggtgcggaaacgctcgacgaggaaatcgacgagcgtgcgcaccgccgtcggcaggccgcgcgatgccgtgaacaccagatagatcgtcgcctgcgacatctgataatcgggaagcaggcggaccagcgttccatggcgcaagccttccgcgcagacgatatcgggaagcagcccgacgccgacgcccgcatggatcgcttccagaacggcgggcacgctgcgacagctcatgcgcggtcgatgctcgtgccggtatagcgcgccatccggcccggtgaaatcccagacgtcgacctcgcgccagtcgatcaggccgctggtaaacgaaaccgtcggcacgtcggtcagcgattcgataccctcccccttgggcagccgcgccgccatctccttgttggccacaaggatgagatcgaccttgctgaggacacgcatcgtcagctcggcatcggtttcctcggtcagctgcgcccggatggcaaggtcgagtcggtcgttgatgatgtccacccgctggtcggtggcgagaatctgcagctggatcttcgggtggagcagcaggaattccggaaagatcgcgccgagcgaaccctcgagcaggccggtcggaacgctgagcctgatcgttccctgcggttcgccattggcgtcattcaccgctttcgtcgcccgttccgcttcacggagcatgttctcacagtaaacatatagtgattgaccgagctcggtgacacggaaccgatgcaccgttctttcgatcaatcggacaccgagccgatcctcgagcgccgtgatgtgccggctgagtttcgacttcggaagacccagcacgcgacccgccgcggagaagccgccatggcgtacaaccgctgcaaaataagcaaagtcgttcatatccgggaaaatagtttcagacgctggcactagccacctcctcgacaacaaggtcctaaaacactccccccggccagtcgcatacgccgcgaaatcgaatatgccaactgcgacttcaaacttttcgttccaaatttggaacatagcgttccagtgagcccccttcattttgctgcaacgcggtactatctcgccgacattgccgtcaccgcgtatcttgacggtgccctgttgctccccggagcacccgaaatgatcgctgaattgtgttgctccgcagctgccggggcattgcgcgctttgcgtaagtcattgatattgtggcaaattcgccacatgatctgcctaacaagtttcacaaacaacgatttagccaccatctgaattgatagatttactaagggatgagaaagaagagtcagcggttcgctgatccgcgtgccgaaaggctgtttaccggaacggttgccatcattttcaagtgtgtggtgacggtctcttctaaaaggaaatggatttcaaatgaacattcggatggtcttgttgacgtctgcagcagccatggctgccgccgcgtccccagtcttcgctgctgacgcgatcgttgcagccgagcctgaagcagtagaatacgttcgcgtctgcgacgcttacggcactggctacttctacatcccgggcaccgaaacctgcctcaagatcggcggttacctccgttttgaagtatacggcggttccaaccagaagggtaactcggactggaacgctcgtacgcgcgcccaggttcagttcaccgcaaagagcgacaccgagtatggtcctctgaccggcgttatcgttctccgtaacaacggcgacaacgcttccacgacgtccacgctggactccgcctacatcgacatcgccggcgtccgcgctggtctgttctacagctggtgggatgacgatctgagcggcgagccggactccctgtccagctaccagaccctccacaactccattcgctaccagtacgaatccggcgacttctacgctggcgtttcgcttgacgaactggaagacggcgctggcgcggaccgcggcaccaacaacggcaacgccctgggcgtagctgctgcgattggcggcaaggtcggcggcttctcctatcagttgatcggcggctacgacaccgacaccgaagacggcgcaattcgcggcatgctcttcgctgacatcggacctggcacgctcggcctggccgctgcttatgcaaccggcatcaacagctactacgacgagtccgagtggaccgttgctgctgaatacgctctgaaggcaactgaaaagttcacggtcaccccgaccgttcagtacttcggcaactacggccacaacgcaaccgacaccgacttctcgtccaacgacgcttggcgcgcaggtctgacggttgactaccagatcgtagacaacctctacgctaaggcaactgtcgactacacggacgtcgatgacgaagatggcgtaaccaagggcttcttccgcctgcagcgcgctttctaatctgactatcggcgccccggtttaggccggggcacctctcacaagtttgcgttttctgatccgattgacctccgatcagttacggggattggtccggtttccctgctggaccaatccttgccattcaaggacggatttgccgcgatcgatcgccgaatccagctcttatcaagcgccgtcggcgtctcgccttccctggatcgtcagctcctcgatggagtcgacccgatcgggataaaaggcgacatagcccttgatctcgccgacggcatccgagggatcctcatagctccagatcgcgttctccgaacgctttccatccgacacgattgtgtagtaggacgcctcgcccttgtacgggcagtggctcttgtgaggactgcgcgccagcagcgccacatccacatcgccgcgaggaatataggagacggcgggatagcgcgcctctttcagcgtcagcgccttgcggctatcggcaacgacgcggccattccatgtgacgaccacacgcttcgggtttggcgtaatcgtgatcggatgatccgggccgggtatcttcatcggttgagcggacatcggcaactcccatgatgctgaaggcatcaatatggagcgcacgacggctgtttgcaggacggatggcataacgatgcggtgatcgatcggccggacgccgagaccggcttgaatcaaccgctcagaagaattcgtcaaggatctgatagcgcttcattttaacggcatccagcgagacgagcccatagtgtcggcaaaacggctcgacgaacgcctcgccgaaattcccaacgatgctgcggcaggcaagcgcgatatcctggtagcggtcggccacgccaagccgaccgcaatcgatataaccggcgaagctctcatcggacgcgacgaaattcggcaggcaggcatcgccatgcgtgacgacaaggtcctcatcgccggcaggcatccggcgaagctccgaaaacagatcgtgagcgcttcgccccagccgctcgccatcgaaatccccctcgtcgaccaacccggcccgcatacgccgctcggcggcagcaagccgtttcgaccatcggtgatcgaaggggcatgaagcgatgtcgagggaatgcagcgcgcgcaacgccgaagccagcatcaccacccgcgcctcgaccgaaaacgtcgaggcggacgcaagatcgcggccaggcaaggcactcatcagcagccactcacagccatcctcggtgacggacgcgatgatatcggggcacggcagccgctggttcgacaaccacagcagacgcgccgcctcgtccgccaactcgccatgtgcactgcgagcctcgcgcttcagatagaacgtcggtgcgcccgtacgctcgaggcgaaacacctcggaggtcgaccgcccgatagaatcacgatcccaggaataacccgcgatgaagctgtccagtgcagcgggatgagccaagcgaggtctcacacggttggcccgcctcgatcgaggccgcggcgatcagtgtactgtttcgggctgcatttcgccgtagaggatggaaagcgcgtcttccagcgctgacaccagaatgtcggtcaactcgtcgccacggctttcgatgatcgccaccttggtggcttcgtcctgctgctcgaaaaagcgctcgatttcgttcgacatgtcattgtcccctcttgtgccgctaacatccggcgatgggacaaagctaagcggtcatgcttgcgtcggactggagcggagcggatcaacgattccgtttcacttcgacacaaccaatctagcgcatttcgaaaacgcttccagaccgttaagcaaaacttccgttatttccctaacatcctgcctcatcatttcgtgcgaagcctggtcgaaacgtacccgtcagaattccgggaacccacggctgcgccactgcgacttcgggatcgcggcgccgacatcataggcgaaggacacaaccttggtgccttcggtatcgacctcgcagcggaagctcatatcgtaccagcgcgaactcgcgcggaacgcgccgcgcttgatctccagcacattgccctgctgcaggcgataggatggcagaagctccggccggaacccctgcggcgagcgcctcaactgttcgcgcagttccgtcgtgcagagctcggcgatccgcataccccgcggcatgccgtcgatcgccgtcctcgccacggcaccgcccgtgtcgttctgcgaatagagcttcttgaccttggtcagttgatcggccgccggcgtggccgtggcggcggggtccggtttggcggtctcggtcggcttggcctgcatgatatcggtcgtcacaacgcctgtcgcctcggcgggcggcccgttgttttgctgaagcgtgttggcgacatcgacctgcggcaggttgatatcgtcgggtatcggcttggccggcggcttgtcgtcggcctcgggctttccggccgatacgggatcgtcggtgggcttttccgcatctggcgcgccggcgggcttgcccgcttcgctcgatgcgtcgccatcctccgccttcctcggaccgctcgccttgtcaccgaattcgaagacggggcgcagcggacggatcggctgcggcttgccgtcgggtcccttcggctgctggtcggcctttgcctgttcggcggggtcgggcttcggcggctcctcggccttctgctcctcgggcggcttttcttctggaggcttttcaggcggcggcggctcgggtggctttggctccggcggcttctcttcagccggcttctcttcaggcggcttgggcgcctccggtggtttctcctccggcggctttggcgacggcggcggaggtggcggctctgccttggcctcctccttcggcggttcgggcggcttctgctcggccttctgttcttccggcttctgctcggcggcgggcttttgcgccgccgccggctgctcgggtttcttctcctcgggcttcggttcttccggcaccttcagcgctgcctgttcctccggcttcttctcctcgggcttcttttcctccggtggcggcaccatctcgacattgaccgtctcctcctgaggaggcggcgtcggctgcggcagcctgacgagaaagccggcgacgatggcaacatgaagcagcaccgaggcgacgacgccccagccgaacactcccaattgcttttcaggtgccttggccatacccacgcgatgctgaacgacaagttgtcgatgtggcctttcaagaaggcatcatcaagccttaaaggcaaaaaacacgatcatctggcaagcacctgaacaccaggcgcacaatccccagcccgagaccgtcaagaacgcgaaaagccggacccagggcccggcttttcgaatgacgttgtccccgacttagctgtcaaggaacgagcgcagcttgcgcgagcggctcggatgcttcagcttgcgcagcgccttcgcttcgatctgacggatacgttcgcgggtaaccgagaactgctggccgacttcctcgagcgtatggtcggtgttcatgccgatgccgaagcgcatgcgcagcacgcgctcttcgcgcggcgtgagcgaagcgagaacacgggtcgtcgtctcgcgcaggttcgcctggatggccgcgtcgatcggcagaagcgcgttcttgtcctcgatgaaatcgccgaggtgcgaatcttcttcgtcaccgacaggcgtttcgagcgagatcggctccttggcgatcttcaggaccttgcggaccttctcgagcggcatggcgagcttttcggccagttcctccggcgtcggctcgcggccgatctcgtgcagcatctggcgcgaggtgcggacgatcttgttgatcgtttcgatcatatgaacaggaatacggatcgtacgggcctggtcggcgatcgaacgggtgatcgcctgacggatccaccatgtcgcataggtcgagaacttgtagccacggcggtattcgaacttgtcgaccgccttcatcaggccgatattgccttcctgaatgaggtcgaggaactgcaggccgcggttcgtgtacttcttggcgatggagatgacgaggcgaaggttcgcttcgaccatttccttcttggcgatacgcgcttcgcgctcgcccttctgcaccatcgacacgatacgccggaattcggcgatggagatgccggtttccgttgcgaggttctggatctcctggcggatgtcgcggatcgtggtgttctcgcccttggcgaattccttccagccgcgtgcggcaaggttggcgatcgacttcatccagttcggatcgagctcggcgccttggtactgctccaggaacgagtcacgcttgacgccgtaggattcggcgagacgcagcaagcggccttcgttctgcatcagtcgcttggagatatcgtagagctgctcgacgagggcgtcgacgcggttctggttcagcgacagagacttcaccgccttgatgagctcatccttgagctccttgtagcggcgttcctgcgcggaagacagcgtgccggttgcagccagccgctgctcgacctgctggtcctgcagcttgcgcagcttcttgtaggtctcggcgatgatgtcgagcgtttccatgacctgtggacgcagttccgcttccatggcggccagcgacaggttggattcgtcctcgtcttcttcttcctcttccggaggcaggccctcgccgccgacattggtgatgtcgtcgtcgcccgaacgggtgcggcgggtcttttccttctcctcggcggccttgcggtcggcctcgatcttctcggggctctggaactgcggcgcagccttcgcctcgggaccggaataggtcgtttcgagatcgatgatctcgcgcagcagcgtcgtgccttcgttgagttcgtcgcgccagatgatgatcgcctggaaggtcagcgggctctcgcagagaccaccgatcatcgtttcgcggccggcctcgatgcgcttggcgatggcgatttcgccttcgcgcgacagaagctccaccgagcccatttcgcgcaggtacatgcgcacgggatcgtcggtacggtcggtcggctctttcttcttggcggtcgcgagcgcggtaccgccggagggagcaagctccccgccttcgctttcctcgtccgaaccggaatcgtcgtcgccggcgtcgttgccgccggcttcttcggcttcttcatcctcgatgacgttgatgcccatgtccgacagcatcgacatcgtgtcttcgatctgctcggacgtcacttcctcggacggcagaacggcattgagctcgtccatcgtcacatagccgcgcttcttggcggccttgatcattttcttgaccgcgtcatcggaaagatcgagaagagggccgtcggtaccgccgtcgcgttcgacttccgcttcttcgttctctttgaccttcgttgccatgtatatcgtcgccttcctgacgctattcaaactcgctgcggtaaaacggccctatcaaggccggcgcgccgcaaacggccgtctcgaatcacctgatcccaaataacgggatgacatttaatgcctgattaaccacgattgccggcgccggacgacagagttcatatgtcaccaaatgtccggccatggttgtgcgatctgcccttgacccagttcaccgctattcaagtcgaacggtgattcccacaattttagttctcgtcaagcttttccagcaaaaaagcgcgagaaaacttggaaaaagccttatccacaggccgcaagccgcaagccgccaaagcggttgccaagcatagataggatgtcaccacgggaagacaagagcgtgcgccattcttgtgaaacggccggctgcgcacgctgtgcgcgcacctccaagcaagctaatgcgacttgccgtcccatggctggatctcgatcgccgcaagatcgacggcggggacgcagcgcagattgatgcaggccatctccgtgccatcgggcatcttgccctcgctgaacgggccgacgccgcaattgccgcagaagtgatgctggatcacatgggcgttgaatgtgtaggtcgacagtgcctcgcgcggcgtcttaaggctgaacttgtcgcgcggcacgaaagcgagcaacccgcctcggcgccggcagagcgagcagttgcagtcgatcgccgacgtaaaatcgccctcgacatcgaaggcgatctggccgcagtggcagcttccttcataaatcatgtcattctcctcccattaccagtccatcaccaccttgcctgagttacccgaccgcattgcctcgaaaccctcgcggaaatcgtcgatgccgatgcggtgagtgatcaagccggacaggtccagcccaccctgcacgaaggcgatcatcttgtaccaggtctcgaacatttcgcggccgtagatgcctttcagattgagcatcttgaagatcaccttgttccagtcgatctcgaagccggcgggcgcgatgccgagaatggcgatcttgccgccattgttcatcttgtcgatcatgtcgcgaaaggcgggtgcggcgccggacatctccagcccgacatcgaagccctcggtcatgccaatcgacgtcatcacgtcggagaggttctccttcgatgcatcgacgacatgatcgatgccgagcttgcgggcgagatcgagccggtgcggattgatatcggtgatcacgaccttgcgcgcgccggaccgcttggcgaccagcgcccccatgatgccgatcggtccggcgccggtcacaagcacgtcctcgccgacgaggtcgaaggagagcgccgtatgcacggcattgccgaacggatcgaagatcgccgcgatctcatcggggatatcgtcggggatcggcacgacattggcttccggaatgcagacgaactcgccgaaggaaccgggacgattgacaccgacgccttgcgtattgcggcacagatgcccgcgcccggcgcgacagttgcggcattttccgcagacgatatgcccctcgcccgagacccgctcgccgacatgatacttggtgacggcggagcccacctcggcgatcacgccgcagaactcatgccccaccaccatcggcacaggaatggtcttctgcgcccactggtcccagttccagatatgcacgtctgtcccgcagatcgccgatttccggaccttgatcagcacatcgttcggcccgacctccggcaccggtacgtgctccatccagagcccggcttcaggcttggacttcaccaacgccttcatcatgttcgacattcaattcctcccaattgccgcgttcccccttttcccacaggggagaagggggaacgctcgcagcggctcaaatcacacccaactcccgcccggcctcggcgaatgccgcaatcgctcgctcgacgtcctcgcgcaaatgcgccgccgacatctgcgtacgaatgcgcgcctgccccttcggcaccacggggaaggagaagccgatgacatagacgcccttcttcagcatcagcgccgccatgtcctgcgccagcttcgcgtcgccgagcatgacgggaatgatcgggtgcccctcgcccgccagcgtgaagccgagcttcgtcatctccgaacgaaacagatccgcgttggcggacaaccgcgcccgcagcgcatcgccatgatcgatcaggtcgaagaccttcagcgacgccgccgcgatgacgggcgccagcgtgttggaaaacagatagggccgggaccgctgtcgcagccattccaccacctccgccttcgccgacgtataaccgcccgatgcaccgcccagcgccttgccgagcgtaccggtgatgatatcgacccgcccctcgacgccgcaatgctcggccgagccgcgaccatgcttgccgacgaacccgaccgcatggctgtcgtcgaccatgaccatcgcgccatacttctcggcgagatcgcagacacccttgagattggcgatgatcccgtccatcgaaaacacgccatcggtggcgatcagcttgaagcggctgccctcggccttcttcaactcctcctcgagcgccgccatgtcattgttggcatagcggaaacgcttggccttggagagacgcacgccatcgatgatcgaggcatggttcagcgcatcggagatgatcgcatcctcttcgccaagcagcgtctcgaacaggccgccattggcatcgaagcaggaggaataaaggatcgtgtcttccatcccgagaaacgacgaaatcctggcctcaagctctttgtgctcctcctgcgtgccgcagatgaaacgcacggacgccatgccataaccatagcgatcgagcgcctgcttgcccgcctccgccagctcttcgttgtcggcaaggccgagatagttgttggcgcagaaattcagcacccgctcgcctgaagcaatcgcgatctcaccggcctgcttcgaggtgatgacgcgctccgccttgtaaagcccggcctccttcaggccggcaagctcggtgcgtaaatgggagaggaactgcgaggtcattggtggcccttctttgaaacttcccgatgccatcgcactagcacatcggcaccggtttgtcttggcgagaccaaagccagtccgtcaccggatcacccatcaaaccccaagatcacctccagaaacgcatccccatagcgctccagcttcgattgcccgacgccggaaatgccgagcagttccttgtgcgtgcgcggccgctcggtggcgaaggcgatcagcgtcgtgtcggggaagacgacgtagggtgggacgctcagcgagcgggcgatcgcggtgcgctcggcgcggagcgcctcgaacagcgcgtcgtcggagcccgacaggaccgagcgccgctcggcctgcgccgccctcttcggccgccgttcggaagccgggcggtccttgcggaagaacacctcgcgctcgcgcttgaacacggcgcgcgcgccctcctccagcttcagcgcgccgaaagcgccgtggtcgacgcgcaccaggcccatggcgagaagctgccggaacacggattgccaggtgcgcgcggcgatatccttgcccgcgccgaaaaccggcatttcggtgtgaccgaaacgctccgtcttttcgctgacattgccgacaagcacatcgacgacatgcccggtgccaaaacgctctcccgtgcgatagatcgccgccagcgccttgatcgccgcatccgtcccgtcccaggtctcgaccggcttcaggcaggtgtcgcagccgccgcaattgccggcatggctctcgccgaaatgcgagagaatagcctgccgccggcacgacgccgtctcgcagatggctaagagcgcgttgagcttggagcgttccacccgcttgatctcgtcggcggcaccgccttcgtcgatcatccgtccgcgctggatcacgtcggccatgccataggccatccagacctcggaaggcagcccgtcgcgcccggcgcggccggtctcctggtagtaggcctcgacggaacccggcaggtcgagatgcgcgacatagcgcacgttcggcttgtcgatccccatgccgaaggcaactgtcgcaacgaggcagagatcctcttccttgaggaaggcatcctggttggcgtcgcgcacggcgcggtccatgccggcgtgataggcgagcgcgcgaataccctggccgttcagccactcggccgtgtcctcgaccttggcgcgcgacaggcagtagacgatgccgctattgcccttgtggccggcgagaaaccgcaggagctgctggcgcggctggtcgcgctcgacgatttcgtaactgatgttcggccggtcgaagctggtggtgaagatcttcgcaccattgagacccagccgggctgcgatatcgtcgcgcgtatgcggatcggccgtcgccgtcagcgcgatgcggggaacgccgggataaagctcgccgagcttgccgagctcacgatattcgggccggaaatcgtggccccattgggatacgcagtgcgcttcatctatcgcgaacaaggcgatcctggcatttccgatgatatcgcgaaacccctccatcaggatgcgctcgggcgtgacataaagcaggtcgagattgcccgacgagatcgcccggcgaacctcgacatattcctcgcgcgtcagcgacgagttgagcgcggccgcgcggatgccgagctgtttcatcgcctccacctgatcgcgcatcagcgcgatcagcggcgagacgacgatgccgacaccatcgcggcagagtgcggggatctggaagcagatcgacttgccggcgcctgtcggaaacagcaccagcgcatcgccgccatcgaccacatgctcgacgaccgcctgctgcttgccgcgaaaggccgggtagccgtagacgtggttgaggatgccgagcggcgtgcgctcggcgccaaacagcgcgtcacccgccgaaaaccgtgtatccgccgcgtccatcaatggctcgcagcccctttgacgcgacccgagagcacgccgaagccatcgatgatcgcttcctggttctcaagccgcagcccctcgaagtgaacctcctgcaacgcccgcatcagctggtcgatcacctcttcattgccgctttcggtggcctcggcgatctctttctccagctcgatcttctgccagcgcagcgccttggcgcgcttgtggaaggcaagcgcctgccgatagccctcgcgcgcatcctccatcgccgcctgctcggtggcgatccacagccgcgcattgcggatctgctgctccagcgtctggatcagcccgccgaagccctgctcttccagccgctcgaccagataatcgcgcgtcagatgcgggcctgcgacggcggccgcggccccgagcatgcccgaccagagccgctgtagctcgcggctgtcgtaatcgatcgaggcgatctcgtcatactcgtcctgcatcagcgccggatggttgacgacggtcagcgccagcacgctttcgcgcagcgccggcgtttcctgatggccgcgcaccagcccggagcgagccagccgatccgaaataccgccgccggaaacgcgcgcgccgcgcgggccatcgttgccgcgtccccgcccctgcccaccgccacgttcgaagccgccgcgatcgaaattgcgccgctcgccgccgtcgcggttctggaactgcggccggaaaaagccgttcagccgatcgcgcatgtcctgctggtagtgccggcgcacatcctcgtcggcgatgacggccaccagctgcctcagccgcgcctcgagctcggccttcgcctccggcgtctcgaacgagccggtcttcagctcgcggccccagatcatctcggccagcggcttggcctggctcatcaccttgtcgaacggcgcccggccctcgttgcgcacgagatcgtcgggatccttgccatcgggcagcagcgcgaaacgcacggtgcggccgggcttgatatgcggcagcgccagatcggccgcgcggttggcggcgcggatgccggcgccgtcgccgtcgaagcagagcaccggctgcggcgtcatcttccagaggagctccaactggttttcggtgagcgccgtaccgagcggagcgaccgcgttctcgacgcccgcctgatagagcgcgatcacgtccatgtagccttcgacggcaatgatcgtgccttcgccattggcgccctgcgtcgagcgccgcgcgcgggcgaaattgtagagcacgttgcccttgtggaagagctccgtctcgttggaattgagatatttggccggcgcgtccggcgacatggcgcggccgccgaaggcgatcaccttctcgcgcgacgataggatcggaaacatgatgcggtcgcggaagcgatcgtaggaaaccgggatctccggtccgtgaacgaccagcccgcaggcctcgatctgctccttggaagcccccttgcccgccagatgctccttcaacgcattgcggctgtcgggcgcgaagccgagccggaaggtttcgatcgtccggccggtcagcccgcggtcgcgcagataggcgcgtgctcgcgccccgttcgccgtctgcagctggtcctggaagaactgcgtcgccagttccatcacgtcgagaagcgtggtccgctccttctcgcgcttctccatggcgggatcggcgacgggcatcgcgacaccggccatatcggcgatcgtctgcaccgcctcgggaaagctcaagccctcgagctccgtcaggaaccggaagtggtcgccggttacgccgcagccgaagcaatgatagcgtcccttgcggtcctcgcagtggaagctcggcgacttctcgccatggaacgggcagcacgcccagtaatcggcgcgcgagacgttggtcttgcgcttgtcccagctcacacggcggccgatcacgtccgaaatcaggacgcggtcgcgtatctcgtcgagaaaggaatttgaaaagcgcatttatacctcttggctatcctccatataaacagcttatcccgcgcatgccacgaacttcggccgatagccccgctatacacagcttgctcgacggacgacgcctgacgacgcggccatcccatccgttcgaccgagagcgactgtcggagcccggcgcgagcaggcaggcgccctatttacaggccagacgaggtcatccgcgatgtagaaccgcgcgcctcgcaaataaaacaaagccttacggtcgagactcgaatccgatcgcgagccggacaccctaactggtgttcgctttaaggcggcgatgcccgccaattattatatttttgtaatttgaatccgatgccgcatcgcaataacgtctaactcaacaaagcgatcccctcgcaaggcaccatccctacccccggcgccgccttgcaagggtgcctttgcaaatacccgctgatgtggacccaggtcctgcgtcgtcagccggagcaaagagcaagaaggcaggaacgcccccagttcctgccttctctaatttctacctgacgttttatattttggccggatctgtcgatctcaagcagattccaccagcaattgattgacagccgttggtctcgagtccaatgaaggcggcaacttcggatggttgccaggaatgccacataaggttgaagaatttttagagagtgacgcgtttttcgcgttggttttggaattcgcgcgcgaaatgctcgcgatctaccgcgaaagcccgcgcatcgcatcgatattcgccgcccagcaacgctggttgatggcccagctcggattcgcgctctacttcggctatcccgacgatccgaagggcggcctctattccggccgcttcatcgccttcgccatcgaaaagaagatcgccagccgcaacacggccgccgccttcatgcaggaaatgctcgcctatcgcttcctgcgcccggtcgaaagcccgtccgacaaacgcacgcgactgctggagcccaccgagaccgcgttcgaacacttccacaagtggctcgccgctcacctgatgatcctcgacaatctcgatggcggccatcgcctcgaggcggcgatgaaggatccgacgatcttcgcccgcatgcagccgctgatcgccaagggcatcatcgacagcgacgcggtgcgcgatcccggcaagacctacaatctcttcaactgggcgaactccggcggtctcgtcatggatctgctgatgacgcggatcacctcgcttgacatctcgatggagcgcgtcgcgatcggcaggctgtcgctgaaggagatccgcgaccagttcatgatctcgaacacgcatctgaagcggctgctgtcgcaggcctccgagatggacagtatcggctggtccgaagcctcgttcaagggcgagacctggctttccatgaagttcgtgcgggaatattggggctatcaggccgcgaaattcgccgtgatcgacgcggccaccgaaagcgtgctcgggcccgcggtcccaaggaccgcgcgcctcgcttgatcgatcagttcaagagttccttgacggcgcccgatgccttggagaaatccatctggccggcatagcgctctttcagcaccgccatcaccttgcccatgtccttcggaccggcggcgcccgtctcggcgatgatcgccgcgatgttggcgcgcacatccgcatcggaaagctgcttcggcatgaagtcctgcacgaccttgatctcggcgcgctccttggcggccagttccggacgggaattctcttcgtagatcttcgccgattcgtcgcgctgcttcaccatcttggcgaggatctgcaggatttcgtcgtcgctggcctcttccttgccggcgccgcgattggcgatatcccggtccttgatcgcggcctggataaggcgaaccgtcgaaagacgctcggcattcttggatttcatcgcatccttgagggcggcggcgaattgatcgcgcaacatcataaacactcctattgaatgccgcttcataaaccagacgaatgcatgggatcaaataaattgcgagacgcgggccataaagcggcagaaaacccctggaatctgcggtacaaagattgaccttgagacatagcgtgggtatttaccgccacctgcaccaaaattcgtgatcaggcctgagagcgcgcgccttgccgcgcgtacacgcttgcgaaccaaaatggctggccaacgttgcccaaggacgtctggcggccggaaacgggatgaagatgaccgcgacagcaccctggacaaccgaaaagccgaccgccctgctcgttctggcggatggcacagtgatcgaaggcaagggcatcggcgcgaccggcaaggtccaggccgaagtggtcttcaacaccgcgctgaccggctatgaagagatcatgaccgatccctcctacctcggccagatcgtcaccttcaccttcccgcatatcggcaacatcggcaccaatgacgaagacatcgaagacctgacgccggcggcacgccatggcgcggtcggtgtcatcttcaaggccgacatgaccgacccgtccaactaccgcgccgtcaagcatctcgacgcctggctgaaggcccgcggcgtcattggcctttgcggcgtcgacacccgcgcgctgaccgcctggatccgcgagaacggcgcgccgaacgccgtcatcgcccatgacccgaacggcgtcttcgacatcgacacgctgaaggccgaagccaaggcctggagcggcctcgaaggccttgacctcgccaagatcgcctcctccggccagtcgtcgcagtggtcgcagaccccgtggatctggaacgaaggctacggcgaactgaaggccgaggacgccaagtaccacgtcgtctgcctcgactacggcgtcaagcgcaacatcctgcgcctgtttgccggcctcgattgcaaggtcaccgtgatgccggcaacgacgagcgccgaggaagtgctcgccatgcagcccgacggcatcttcctgtcgaacggcccgggcgacccggccgcaacaggaaagtacgccgttccggtcatccagtcgctgatcaagaccgatatccccgtcttcggcatctgccttggccaccagatgctgggcctggcgctcggcgccaagaccgaaaagatgcaccagggccaccacggcgccaatcatccggtcaaggaccatacgacgggcaaggtcgagatcgtctcgatgaaccacggcttcgctgtcgacacgaagtcgctgcctgaaggcgttgaggagactcacgtttcgctcttcgacggcaccaattgcggcctgcgtgtttccggcaagcagatcttctccgtccagcaccatccggaagcctctcccggcccgcaggacagccactatctcttccgccgcttcatcaacatggtgcgcgagaagaagggcgaagcggcgctggccgaacgctaagcgcatataaaggttgaaagagagcggcgcccggacaccccggcgccgctttttcatgtccggcccctgggcatggtcttgcagtctcctgttaatcgcaagttaaggccgccatctcatcatcggcgcccaagcccgcgggcagtgccggcttcaggtgccaccgatgccagaaaagaagcacatagccagtctcgacggcttgcgcggcatggccgccgcggcggtggtcttctcgcacctcgacctgatcttcccgcccctcgcccccttcatgataacggggatcggcggccgcgccgtggcgatcttcttcgccctcagcggcttcctgatggcctatctctatggcgaccggccgatcagccgcaaggccgtggccgacttcctggtcagccgcttctcgcgcatctacccggtctatctcgtcgccgtgcttgtggtcgtggttctgtcgaacattcccggcctcgatttcatcaaccccatccagggcgccagggaaatccttcgccacgtcctgctattcggctccaccggcgtcctgtggtcggtgccgccggagatacagttttatctgctttttccgctgatctggctgctcttcagcgacacgaaacgctaccaggtgatcggcgtgctgcttgccggctttctcgcgctcgatgcgctcgccggcttccccggccccggcatcctgctggtctcgaagctcgccttcttcctgttcggcgccgccgtcggccggatgcagccgctgttgaaccggcaatcgccgggcctcgccacgggtgtgctggcgctcacgctgcccttcatcatcctggtgtcgaaccagctgtttcccaatgcggacaacgcctggggactggcgccggccttcgcgggcgcgctggccgttctgctggtggcgcgcgagcaccggctgtcggcagccttcttcgccgcccgcccgatgcgtttcctcggcaagatcagcttctcgctctatctcttccacgtgccggtgatgttcctgatgggcaatgccctgtcgtcggtgcttccgctctacgtcgtcgcaccggcggcactggtcgcgaccctcatcattgcctggatcagttacgaatgcatcgagaccccggcccgccgggcgctggtatcgctctggcatgaacggggatcgaaggtcatcgccgacccgcagcccgacacccgcgtctgagcgacggcgttagacctcgcgccgcatcaggatgtagaaccgcgcgcagagcatgacggccgccgcgagcaggccgatcaggaagccgagccagatgccgattccgccgaagccgagcggaaacgccagcgcccaggcgaggaagaaaccgatcggccaataggcgattagcgccaggatcatcggcacgcgcgcatccttcagcccgcgcaacaggccgttggcgatcacctgcagtccgtccaccagctggaaaagcccggcaatcacgatcagcggtccggcataggccagcacctgcggcgcttccgccgactgcgtatcgaggaaccaggccgcgaagaaaccgggcatgatcgcgaacagcaccccgccgatcgccgaaatgacgcaggcgagcaccgataccgacacggccgcgcgcaccagcgccacgcgatccccctgcccgtgcgcgacgccgacccgcacggtcgccgcctgcgacaggccgagcgggatcatgaaggcgatcgatgcccactgcagcgcgatcccgtgcgcggcaagctcgatcgtgccgatccgccccatcaagagcgacgccatggtgaacaggctgacctccgcgaggatggtcacgctgatcggcaaccccaggcgcacgacctcgaagaaggccttccagtccggccgccagaagcgaactagtatctcgtagcgccgggtctccggccggcgctggacataggccaggatgaagaagaagcccgccgtctgcaccaccaccgagacgatcgccgccccgcgcagccccatggccggcaggccgaaatggccgagcaccagcgggtaggcgaaggcggcgttcagcaccagcatggcgatcgtgacattgaggacgacggctgccttgccgatggcgctgaccagcgcgcgcaacacgttgtagagcagccccggcagcaccgcgaactgaccgatgacgatgtagccatgcgccagcgccgccacctcgggcttctgcccggcggcaagcagtatctgctccgagttgaggaaaacaggcagcatcagcacccaataggcgagaaccacccacaggcccatgcgcagcgaccggcgcacgctgacgacgtcaccacggccataggcctgcgccaccatcggaatgacggcgatcgaaaagccggagccgaagacgaggatcgtgaacaggaattggccggccagcaccatggccgccagattctcggccccgagccgcccgacgatcatcacgtcggtggtattgatgccgagctgcgccagctgcgcgccgatcagcggcacgccgagcgccagcgtcgcgcggaaatgcgcgctccaacggttatcggttgtcggcgccagctttcgcgcgtcgatcggcgtatccatgacggtgtcccgtgaactgatgtgaatggtcgcaaagcgcgacaatatcaccagcctctagcggaaatcccgatgaagtgacacccgaaaacatgcaggtgatgaaatattcatcatcacatcatcaattctgatcgatcactccgccgcctggccgaacgccttgccggtcttggaaatccgcacccgcagcaggaacaccagcgtggcgatcaggatgaagaccgccgccatcaggaagggcgcgcccgcgaaggtgaccggcgcatccggcttggtgaaatagccgaacatctgagtgaagatcagcggcccgatgatcgtcgtgatgctgctgaggctcgtcagcgccccctgcagctcaccctgcgccgagggcggcaccttgccggcggcaatgctgcggagcggcggatcggcgatgttttccatcaccgtgagcacgatgaccacatagaccacccatccctcccaggcaaaggcatagcccgtcaggccgacgaccgagaagcagagcccgaccaccgccgtcttccactcgccgagaacaggcacgatcctcggcagcaccagcgccatgacgatggcagcgccgatcccgtatatgccgagcgaaagcccgatctcgccctcgctccaattgtagcggtagctggtgacgaacgaccagacggccggatagacggcgtgcgccagccagaacaggaacatgacggcggcgacccagccgatgccgggataatgccgcatctgcttcagcgcgccgagcggattggcccgcttccattcgaatgcgcggcggttcttggcgtccagcgtttccggcaggagaaaccatgcggcgacgaaattcaggaaggagacggcggcggcgccatagaatggcacgcgcggcccgaactcgccgagaaagccgccgatgaccgggccgacggtaaagccgacgccgaaggcgataccgatcagcccgaagttcttggcgcggttctcctcggtgctgatgtcggcgatataggccgagcaggtggcgaagctgccgccgctcagccccgcaagcatgcggccgatgaacagcatccagaaactggtcgccaccgcgcagatcagattgtcgatcgcgaaggtcagaacggacagcagcaggatcggccgccggccgaagcgatcgctgagattgccgagcagcggcgcgaacaggaactgcatgccggcatagacgaccagcaaccagccgccatcgagcgccgcatcgctgaccgaaccgcctgtcagttgctccagataggcgggcagcaccggcatgatgatcgcgatcccgatcacgtcgagaaacaggatcatgaaaacgagaaaaagcccacggcggacgaatttggggtcgagcatgcgaggtctctacagcggtttgttttctggaaagacgatctcatcgccgcacaagctacataccgcacgcaagcaggcgaaacaatacgtgaacatttcaattgttttgataggctcacgacttccgttgatggcgaagcggaacaaatcgcgcactcagcgccctttttgcggctccgcctttatgaagtcgacgaaggcgcgcaaggccgccggcatgtggcggcggctggcgtaatagaggaagggcccggagaattccgtcacccactcttccagaatgagctgcagccgcccggcctcgacttcgggcatcagcaactcctcgaaggtgcgcatgacgccgagaccggcgacggccgcgccaacctcgatctcgatcgcattggccgacacctgccccgtcggcgtgatcatcagcgtctcgccattccggtcgaactcccacggcgttgcgctcgtaccgctcaggaaccggtggatgatgcaatcgtggtcgatgagatcgcgcggatgccgcggcattccgcgacgctcgaggtaatcgggcgacgcggccgtcacatagcgctgccgccgcggaccgatcggcaccgcgatcatgtcgcgctccagccgctcgtcgtagcgaatgccggcatcgtagccggcggccagaacgtcgatgaagctgtcctcggcgatcacctcgatccgcaccttcggatggagcgtcaggaagcggttgacgataccgggcaggaaggtgcgcgccacgatcgtcggcacgttgagcctgagcgtgcccgaaggtccgtcacggaagctgtcgagctgtccgagcgccgatgccacctcgcccaacgccggcgccagtctctcgagcaaccgctgccctgcctccgtcggcgtcacgctgcgggtcgtccggttgagaagccggacccccagccgctcctccagccttctcagcgaatcgctgagcgacgaggccgaaacgccgcgcttgcgcgccgccgcgcgaaagctgcgctccctggcgatcgccgtgaaggcgtcgagctcgctgagcggaagatcatccattgttcattgtcccgcacgatgggttcgcattgagccgaaccatcgcacaacggcgcgcaggacgaaaggcgtgggacctggccggcagatatccgtcagacgggaccggagaaggtgtcgcaggcctggagctggccgctgtcgaagccgcgctggaaccacttcatgcgctgcgccgaagtaccgtggttgaagctttccggcacgacatagccctggctgcgcttctgcagcgtatcgtcgccgatctgctgcgcggcgttcaacgcctcctcgaggtcgcccgcttccaatatgcccttctgctgggtgaacttgccccagataccggcgtagcaatcggcctgcagttcgacgcgcaccgacatcttgttggcatcggcctcgctcatgcgctgccgcgcctcgttgaacttgggcaggatgccgagcaggttctgcacgtgatggcccacctcgtgggacacgacataggcctcggcgaaatcgccggatgcgccgaacttgcggctgagttcgttgaagaaggccgtatcgagatagaccttgcgatcgctcgggcagtagaacggtccggtcgcggccgacgcgaagccgcagcccgattgcgtctggccggaaaacagaacgagacgcggctcctcgtaattgctgcccatcgactggaagatgccgttccaggtgtcctccgtttcggcgagcaccgtccgcacgaaggcggtcatctcgtcgttggcgggcgcctggccgccgctggactggctctgctcgtagccaggcccgctggacatgccgccatccatcacctgcagcagatcgatgcccatggccttgaaaatcagatagagcacgacgaggaagatgatggtgccgatgctgagcccgccgccgcgccggcccattccgccgccggacgggaagctgaagccgccccctcttccaaggccccccatggaaggatcaccgcgacgatcctcgatattgtcggactgacgccggcctttccattccatgttgatctccccgcagaggctgctttctctctcatcccttatatatccggggaaacgggaaattccagccgatttcagccatcggccttagccgatcaggcgccgagcgtcacgccgccggaaggcgtcctcatcgacacctcgggcgcggggctcatcagccagcgcaagccgtagtgcagcaacgccaccaccaggatcgaagcgtatccgtccacggcatagtgccagccgagaaaaaccgaactcgccatgatcaagcccacataggcaaaggcgatggcgcctgccctcggcgatatctctgcaatgaagaaggcgttgcaggcaatcagtgccacatgcacgctcgggaaggcggaaatgccggagccgagccccgccattccgctctcgtggagcgaccagagatagtgttgaaaggccgcggcggtgctggcccagtcaccggacgccagcatctggcgcaggccggcgaaacgctccgtatcgccggtcacggcaccgtagaacgccggccccgccgaggtgaaaaaccccgcgagaatgttgccgcagacgatccagaccagcatgaacatgctgacatagtgcacgcgaacggccgcggccgacgtcacgacatagaacaatatgccgaagcagatgagaaaccagagtgcgccgtagttccagtcgataagccaccgcaggacggcgcttgcggaaagactttcgagaaacagccaaggatccgttccgaaagaaagccatcggtcgacatcggccagggtgcgatcgtagagaaaaccgccgcgcagaaagggcaggatattcttgatcgaggtgaacgtgccttgaaagaacatcagcgccatcatcagcgccatgcccgacagaaggtgcgcgacccgctccggcatcagcatcgcctgcatggcgctcatgcgcggctcgttcttgcgcacgaccgcccaggcccaggcggcaagaagcgtcaccgccggcatgaacagcaggaacagataggtccactggccgaagtaaatgctgtaggccatctgggcgccttgcccgctgacgaccatcagcgtcaggccgacgagacaataggcgccaatggccatgtatagccaaaggtcctcgacgaggcgcgctccgacggccgcgatcagccgcgcatgccattgcctggccgtgatagccgtcctcgcccctgtagtcatcacagacccgcccatccagagagaaacgctgaccctcatcgtttcaccgacaatagaaagcctactaaccattaatatttactgaagactatgtattcagaagttgcacttggaaaagagcgaagtatagccgaaccgatcgattgccggcgcgaagggacaagccgcttgacgcggttgcggctttcacttcttctgcgcatggggagaaaatgctggaggaaaagcatgatgagagccgtgcggctcgaagcgacgggccgacttcacctgcaggaggtcgaaaagcctttgccgggagggggagaactcctgatacgcatagaagcctgcggcatatgcggcaccgatcggcacctgttccacggcgaatttccggccagcccgcctgtgacgctcggccatgaattcaccggcatcgtcgagcaggtcggccctggtgtcggcggttttcgagaggggatgcgcatcaccgtcgacccgaacatcgcctgcggccgctgcccgcagtgccagcgcggcaaaatcaacctgtgcgagaatctgcaagccatcggaatccacagggatggtggcttcgcggagcatgccgtcatcccggaaaagcaggccttcgcgctgccagatgacatcgatcccgtccacggcgccttctgcgaaccgctcgcctgctgcctgcacggcatcgaccttgccgggatcaagaccggcgcctcggtcgtcgtgctcggtggcggcgtgatcggcctgctggtagtccagctcgcccgcctcgccggcgccaccgatgtcctcctcgtcacccgcagcgccgacaagcgccggctcggggaaacgctcggcgcgacggcttcgatcgatcccggcagcggcggcttcccgcaaggcctgatctccgccgacggattgctgcccggtggcgccgatgtcgtcatcgaatgcgccggcgtcagggagaccatcgaacaggcgccgtcgcttgcgcgcagcggcggtacggtcgtcatcctcggcgtcatgcctaagggcgcgaaagtatcgatcgagccgttcgaccttctgtttcgcgaggtcagcctgatcagctcgttcatcaatcccttcacgcacaggcgcgctgcggacctgatcgtatcgggcgcgatcaaggtcgagccgctgatctcgcgccgcatcggccttcgcgaggcggtggaagcgatcagcaatccggcccgtcccggcgagattcgcgccctcgttttgccgggtcttggctagccctttccgattcctgtcgattccgtaaattatggggttccgttcacggatacatttgcctataagccgcttctagcctgaaaagaccatcatatgcgcgacccggccggtgcctcccaccctggccggctttctgcgcagctaggaaacggaaaaagcccatgccgaagcgccaagacatcaaatcgatcctcatcatcggcgcaggaccgatcgtcattggccaggcatgcgaattcgactactccggcacacaggcctgcaaggcgctgaaggaggaaggctaccgcgtcatcctcgtcaactccaacccggccacgatcatgaccgacccgggcctggccgacgcgacctatgtcgagccgatcacccccgaagtcgtcgccaagatcatcgccaaggagcgccccgacgcgctgctgccgaccatgggcggccagacggcgctgaataccgctctttccctgaagcgcatgggcgttctcgaccgctacaatgtcgagatgatcggcgccaagccggccgccatcgacatggccgaagaccgcgcgctgttccgcgaagccatggaccgcatcggcctcgaaaccccgcgctcgatgctcgccaacgctaccgacatcaaggatgccgaccgcaagacgcatgaagccgagcgcaacaagctgaaggaaagcctttccggcgccgaactcgacaaggcgctcgacgcgctggaaaaccagtggaacctcggcgagaccgaccgcaagcagcgctacatcagtcacgccatggccattgccgcccaggcgatcgacgtcgtcggcctgcccgccatcatccgcccctccttcaccatgggcggcaccggcggcggcatcgcctataaccgttcggagttcttcgaaatcatcggcggcggcctcgatgcctccccgacgacggaagtcctgatcgaggaatcggttctcggctggaaggagtatgaaatggaagtcgtccgcgacaaggcggacaactgcatcatcatctgctcgatcgaaaacatcgacccgatgggcgtccacactggcgattccatcaccgtcgcgccggcgctgacgctgaccgacaaggaataccagatgatgcgcaacgcctcgatcgcggttctgcgcgagatcggcgttgaaaccggcggctcgaacgtccagttcgccgtcaacccgaaggacggccgcctcgtcgtcatcgaaatgaacccgcgcgtctcgcgctcctcggctctcgcgtcgaaggccaccggcttcccgatcgccaaggtcgccgccaagctcgccatcggctacacgctcgacgaactcgacaacgacatcaccggcggcgcgacgcccgcttcgttcgaaccgtcgatcgactacgtcgtcaccaagatcccgcgtttcgcattcgagaagttcccgggcgcctcgccggtcctgaccaccgccatgaagtcggtcggtgaagtcatggcaatcggccgcaccttcgccgaatcgctgcagaaggcgctgcgcggtctcgaaaccggccttaccggcctcgacgaaatcgagatccccggcgtcgaggaaggcgaaggcagccagaacgccattcgcgccgccatcggcacgccgacgccggatcgcctgcgcatggtcgcccaggcgctgcgcatgggcatgagccccgaggaagtgcacgaaggctgcaagatcgacccgtggttcatcgcccagttcaaggcgatcatcgacatggaagcccgcgttcgcgagcacggcctgcccaccgacgccgcaaacctgcgcacgctgaaggccatgggcttctccgacgcgcgtctcgcaaccctctccggcaagcgcccgaaggaagtggccgagctgcgcaattcgctgaatgtccgcccggtcttcaagcgcatcgacacctgcgctgccgaattcgcctcgccgaccgcctacatgtattccagctacgagacgcccttcgtcggcgccgcccgttcggaagccgaaatctccgaccgcaagaaggtcgtcatcctcggcggcggtccgaaccgtatcggccagggcatcgagttcgactattgctgctgccatgccgcgttcgccctgcgcgacgccggctatgaagccatcatgatcaactgcaacccggaaacggtctcgaccgactacgacacctccgatcgcctctacttcgagccgctgacggcagaagacgttatcgagatcctgcgcgctgagcaggaaaagggcgaagtcgtcggcgtcatcgtgcagttcggcggccagaccccgctgaagctcgccgaagcgctggaaaagaacggcatcccgatcctcggcaccgcgcccgacatgatcgaccttgccgaagaccgcgaccgcttccagaagctcctgatcaagctcgacctgacgcagccgaacaacggcatcgcctactcggtcgaacaggcccgcctggtcgccaccgagatcggcttcccgctggtcgttcgcccgtcctacgttctgggtggccgcgccatgcagatcatccacaacgagagcatgctgcagacctacctgctcgacaccgttccggaactggtgcctgaagacatcaagcagcgctacccgaacgacaagaccggccagatcaacaccctgctcggcaagaacccgctgcttttcgacagctacctgtcgaacgccatcgaagtcgatgtcgactgcctctcggacggcaaggacgccttcatcgccggcatcatggagcacatcgaggaagccggcattcactccggtgactcagcctgctcgctgccgccacgtacgctgtccgccgaaatgatcgacgagctcgagcgtcaggcgaagtcgatggccaaggcactgaacgtcgtcggcctgatgaacgtccagttcgccatcaaggacggcaccgtctacgtgctcgaagtgaacccgcgcgcctcgcgtaccgttcccttcgtcgccaagacgattggcgccccgatcgccaagatcgccgcccgcgccatggccggcgaaaagctcgatccgctgtttgccgcctatggcgagaagccggatccgcgcaacctgaagcacatcgccgtcaaggaagccgtcttcccgttcgcccgcttcccaggtgtcgacacgctgctcggcccggaaatgcgctcgaccggcgaagtcatcggcctcgacaccgatttcgcgctggccttcgccaagtcgcagctcggcgccagcgtcgaactgccgcgtgatggaacggtcttcgtatcggtgcgcgacgacgacaagccgcgcgtgctacccgcgatccgcatgctggtcgaacagggcttcaaggttcttgccaccggcggcaccgcccgcttcctcgccgaaaacggcatcgaggccgtgaagatcaacaaggtgctcgagggccgtccgcacatcgaagacgccatccgcaaccgtcaggtccagctggtcatcaacacgacggactcgaacaaggcgatctccgattcgaagtcgctgcgccgcgcgacgctgatgcagaaggtgccttattacaccaccatggccggcgccgaggcagccgcccaggcaatcaaggcgctgaaggccggcaacctcgaggttcgcccgctgcagagctacttcgcctgatagatcaaagccggccgtgatccttcacggccggccttttcgccgcacgacggccagcgtgacaacacgccgaagtgtcgcaaaacgcgacaatccacctgagatttcaaaccctttgcgatcatgttacgatatccccacacgtgaggggcatcgatgggcaagaatatcgtcattctgttcgatggcacgtcgaacgaaatctccgccgaccgaaccaatattctcaggctattcggcgttctcgaccgcagcgacaaacagatcgtctactacgatcccggcgtcggcaccttcggcgccgccaatgcctggtccaacgcctatcgcaagacggtcgaactctggggcctggcaaccggctggggcctcgaccagaacgtcaaggaggcctaccgcttcctcgtcgacaattacgagcccggcgaaccgggagacgacgaggaataccgggatcgcgacaacatctacatcttcggcttcagccgcggcgcctatacggcgcgggtgctggcaggcttcgtgcattcgctcgggctgatgagcaagtaccacgtcaacctgatcgactacgcctacaacacctacaagggcatctccgaaagcgagcagcagcagggcggagcggatgccgccgatgtcgattgggatgcgccctcggccttcaagaccatgcgcctctacgagcgcacgctgaagaccgaccgcccgccgatcaagctgctcggcctcttcgacaccgtgtcctcggtcatcgtctggggaaaatggcgcccgcaattcctgacgcttcccttcaccgatcgcaatccgagcgtcgaagtggtgcgccacgcgctcgccatcgatgagcggcgaaccacgttcaacccactgccatggcgacaagggcaggactattggggcggccccttcaagccacccgccccgtccccgcagaacgtgaaggaagtctggttctcaggcgtccacggcgatatcggtggcggctatccggaagcggaaagcgccgcgatcaagataccgctcgcctggatgatcgccgagacccgaagcaccggcctcacctacaataacgacgcggtcaacgaactcgtccatggcgacaacccgaccaagagctatgtccgaccggccccagcggcaccgctgcacgactccatgaacagggcatggcgactgctcgaatatgtgccgaggcgtgtgccgatcacctcctggcgcaagcgcggcgacacgacgcgcatctacctgccgctggccgatcgccgcttcatccccgacggcgcctcgctgcaccaatccgtcatcgaccgattgtcgtcgacgacagcaccgccctacgccccgccaaacctgccgctgcgctttgagacggagccctggagcaacgacggcccgccaccatcagaagattcggaggttgttccgatcactccggccgcttgaaataggcctcaagccgatacccatcaggatcgatgacgaaggcggcataatagaactggctgtaatccggccgcacgcctggcgcaccattatcggttccgccattggcaagcccggccgcgtaaaacgcatcgacggactcctcgctcggcgcgacgaagcagaaatgcaggcccgattccatatcgggcgccacaggccgcgccacttcaccgacccacagccccacccgatcggcgccatagccgctgacattgccgaagttcgtcaaccgctcatagccgagcggcgccagcgcggcgtcgtagaacgcttgcgacttctcaaggctcttcacaccaatcgacacatgatcgaacataaacggtctccagattgcttcgtcggcaacgctacaacattcgcgccgaagcgccatggcaattcgcaagacgaggcaggtcatgacttcccagcgcgacactccggcgcgccctatccgagaggatgaattgacaaacaccaatagattgcaatagcatcacctaatttaatcgggactggggaacgaagatgaacactagcggatcgtggctagccgccaattactcatatctcatcggcctgacaccaatcattattggcgcggtaatcctgatcgcgtgctgcattgccgttctccgcaaccagacaacggctgcccttcttggcgtagtggcattcggaacagcactatgcggttccgcggtcttcgcgaatatttcctgggggaaggaagaaggaaaaatcgaaacaatcgcaggagctctagctctggcgtccggcgcatcggacaaaaatcgaaccgcaatcaacggcttgaaagaggctcttgttacgttaagaactcaggtcgacagaattatagccgcccaggcagcgtcttcggccgcaactgggcccgcttcgccaaaatcaagtggaaatgccatattctgcgcggcctctccggaactttgcaaagatggcggtgtaacgtcgcagccaacattcgactggaactccatagagagtgatctcaagaaattcgatagcgatattggcggagtaagtaactcagtaaattccagtcaatcaaagttgaaagagctaaacagcaagctccaaaacatctcgcccgacattaccgatcaatggctaaaatagtgcgccatcccggccatcagctcccgcacccgcaccatgtccgcccgaaacagcgccatctcctcggccttcagccgctcgtcgggaatgcgcagcagataggacgggtggacggtgacgaacagtgttcgctccttgcccatcctgatcggctgccccctgatatcggacagcttgtgcttcgtatccgtcagcgccgtcagcgcggtggcgcccatggcgacgatcagcttcggcttgacgagctcgatctccagattgagccaccagcggcaatgcgtaacctcgcctatgttcggccgctggtggatgcggcgcttgccgcgcggctcgtatttgaagtgcttcaccgcattggtcacatagaccgactgccggtcgatccccgcctcgccggccacctggtcgaacaccttgcccgcaggccccacgaacggccgcccggcgagatcctcctgatctccaggctgctcgccgacgaacataacgctggcattttcaggcccctcgccgaacaccgtctgtgtcgccttctcatgcagcggacagcgcgtgcagacggccgcctcttcacgtagagccgccagcgtgcccacgggcgcctgaggtgctgcgggcactctgcgtgcggcttcctgcagccggtcgtgaaacggcagcggctcgctggcctggcgtttcgccatatcaagaaccttgctttccgcatcggcgatcatgccgggaatgagatcggcctcgggcaggttcttccagtatttcttcggcatctccgcctgcatcgcctttaccttgaggcgggccggattgaagatgttggcgtaataggtccgccacagctggtcggccggatcggtgagatcgggcttctcgcaaggatcatggctgacggtcagcttctcgccgtcccaggcagccgagccccttggtgtcgcgatcacccagtccatgtcgttgaaccgcttctggaagaacggcgccttgcgggcgacgatgtgatgatccggctcgaaccaggcaagaaacttccgccgcccgttgagcgatatccccgagccgacctccttgaaccgcacgaaggcggtcatcttgtgggcgtcgcggcgcacgctcttgtccatcgcgcgtgcccgcgccacgtcctcgtccgaggcgacgtcgagcagcgaacgatcgccttgcagccgccagagcagccgatagagcaggtagaaccgcatcggatcgctatggcagatcacggcctccgcaagcccgataaaggcgggcggcaccgtcaacggcttggaagcatcgagcgccggcagcttcgaagacacttcaggcgcggcaaacagatcggtctcgcgataccgctcacgccactcgatctcctcgggcgcgacacccgaggcagccagccgccgcgcagcgtcgcgccactcggccaattccccccggccctccagcaacacggtcatcatcacagcaacgacaattgttccggcttcggctcgaacatcgccctcagatccggccggtcgatcagccggcgcggcgaccagccctcggccgaaatgaacgcctgcaccttcttgatcgacacgccgagccgcgtcagatcctcgatcctgagctttctgaaacggcgcgccgagaggatcgatttcaccgtcttcgtccccagtcccggcaccctcagcagcgtctcgcgcggcgccctgttgatgtcgacggggaaatcgttgcggttgccgagcgcccaggcgagcttggggtcgagattgagatcgagcatgccgccctcctgcgaggacgtgatctcgtcgatcccgaaaccatagaagcgataaagccagtcggcctggtagaggcgatgctcgcgcatcagcggcggcttgatcagtggcaggttcttcgacgagtcgggaatggggctgaaggccgagtaatagacgcgcctcagcccgtagcttccgtaaagctgcgcactggtgccgagaatggtcgcgtcattggccccgtcggcaccgacgatcatctgcgtgctctgcccgcccggcacgaaacgcttgcgccgcttggtctgcaatgtcggctcggacgccgcctcgatcttcaatctcaaatcgcccatcgagcggcgaatgctggcgggcttcttttccggcgccagctgcgcgatgccgcgatcggtcggaagctcgatgttgagcgacagccggtcggcgtaaagcccggcttcctcgatcagatgcggcgaggcctcgggaatggatttgaggtgaatgtagccccggaaattatgcgtggtgcgcagctcgcgcacgatccgcaccatctcctccatcgtgtggtcggaggagcggatgatccccgacgagaggaacagcccctcgatataattgcgccgatagaactccagcgtcagccagatcacctcttccggcgtgaaccgcgcccgctccacattgctggaggagcggttgatgcaataggcgcagtcgtagatgcagaaattggtgagcagtatcttcaacagcgaaatgcatcgtccatccggcgcataggcgtggcagatgcccgcaccttccgtcgaaccaagcccaccgctcttgctggaatcgcgcttggtcgttccgctggaggcgcaggaggcatcatatttggccgcgtccgagaggatggccaaccgctcttcgagtgacttcttcatggccatgttcactatatgttctatcgctaacagtcaagaaaagccgcttccaattgtcgtttttcaagtttgacgcgaaaagccatgaggggttgcaagtcgcttcatcgaattctctggaaatcgacggaggctatctgctataaacgaagcagatagcgttttggcatggttccgaagttccccttcgggacctgttttcttttgtgtctctgcctagccgacacaaggactgaaggacaggaaaatggttgataaggtaccgatgacgcagggtggtttcgtcaagctgcaggaagaactgcgctggcgtcagcaggaagaacgcccgcgaatcatcgaggcaattgccgaggcccgcgcccatggcgacctgtcggaaaacgccgagtaccatgccgccaaggaagcgcagagccacaacgaaggccgcatcggcgaactcgaggatctgacggcgcgcgctgaagtgatcgacctctccaagatgtccggcagcacgatcaagttcggcgccaaggtgaagctcgtcgacgaggacaccgaggaagaaaagacctaccagatcgtcggcgaccaggaagccgacgtgaaggccggccgcatctccatctcctccccgatcgcccgcgcgctgatcggcaaggaagtcggcgattccatcgaagtcaacgcgccaggcggctccaaggcttacgaagttctggccatcacctggggctgaggatcttggtggatcgcggccgatcgcacatcgtcgatatagccgacgtcgaaatcatagcgccgaacttcaagaagcgtctgtccggcgtcacatcgacgatcatccagcttgttccggttcagcgagcgctcggtcagaagatcgcggcgctcgggccgggcctgccggcgtcgatcccgcatatccgcttccgcgatctcttgaaattgtggcgcgcgccctcggcccggccgttccgcgtctggcacgcccgccgcaatatcgagatgctccctgccctcatcatgcgcgacctcctgcgcatgaagctgaagatcgtcttcacctccgcctcgcagcgcaagcatagcggctggacgaagttcctcgtttcgaaaatggacgcggtgatcgcgacatcgggcaagacggcgaattatctcgaggtccccaacaccgtgatcctgcacggcatcgacaccgcccgcttctcgccgccctcgaacaaggcgcaagccaagcgcgaatgcggcctcgatccggacaagaagatcgccggctgcttcggccgcgtgcgccaccagaagggcaccgacctcttcgtcgacaccatgctgcggctgcttcctgatcaccctcggtggagcgccatcatcgccggccgcgccacggcccagcatgtcgagttcgagaacggcctgaaggccaaggtcgccgccgccggcctctcggaccgcatcctcttcgtcggcgagcatacgaacatcaacgactggtaccgcgcgctcgatctgttcgtcgcgcctcagcgctgggaaggtttcggcctcaccccgctcgaagccatggcctccggcgtgcctgtcgtcgcgaccgatgtcggcgcctttcccgagatcgtcacgacgggcgaccaaggcgcgggcctgctgattgcccgcgacgatctcgacgcaatggcaaaggccgtttcggaactcatggatgatgaaacccgcctggcgcggctcgcggccaatgcacaggcgcatgtcatggaaaacttccggatcgaaggcgaggccacgaagctgaaggccgtctacgacagcctcggctgagacaaatcagacctctgtcaggccgagcttcttgatctggcggatcgtcagcatggtgcgcacggtatcgacatgctcgttggcggtcagcacctcgatgacgaaatcctggaagcgcgtcaggttttcggccacgcaatgcagcaggaaatcgctatcgccagagaccatccacgcctggcgcaccagcggccactgcgtggttgccgcggcaaacgccttgaggttggcttccgactgatgcttgagcccgaccatgcagaaggcgacgagatcgaagcccagcttcgggctgttcagcatcgcgtgatagccttcgatgacgccggactcttccagcttgcgcacgcgccgaagacagggaggcgccgaaatgccgacccggtcggcgagctcgacgttggtcatgcggccatccgcctgcagctcacgcaagatcttgatatcgatggcgtccagttcagcgcgaaccaagcgagtgcctttctttaaattcccgaatccagcttctatataaagcggcacaatacgcaagaatctttccctgagatgacggaatcttgcacatccacaccgaatgccttgttggtaacgcaaggctgcccttgaataaaagcattggtcgttcataaatacgcatggacgcgtgatggccgcattcgccttatatccagcgcgtccagccagttgaaaggaagtctcatgtccgcccgccacaccaaggtgctcatcatcgggtccggccccgccggctataccgctgccgtctatgcggcgcgcgcgatgctgaagccggtcctgatcgcaggaatggagcaaggcggacagctgatgatcaccaccgacgtcgagaactatcctggtttcgccgatccgatccagggcccttggctgatggaccagatgctgcagcaggccaagcacgtcggcgccgagatcgtcaacgacatcgtcaccgaggtcgaggtcaaccagcgccccttcgtggcacgcaccgatagcggccaggtctggacagcggacacgctgatcatcgccaccggcgccaaggccaagtggctcggcatcgagagcgagcagaccttccagggcttcggcgtctccgcctgcgccacctgtgacggcttcttctatcgcaacaaggacgtgatcgtggtcggcggcggcaactcggccgtcgaggaagcgctctacctctccaacatcgccaggaccgtgaccgtcgtgcaccgtcgcgacagtttccgctcggaaaagatcctgcaggaacgcatcttcgccaaggagaacgtcaagatcctctggaacaccgagatcgccgagatcaccggcgcgccggccaagccgccgatgccgccgtccgtctccggcgttcgtctgcgcgacacccgcaccggcactgttgccgaccacacgatcgacggtgtcttcgtggccatcggccatgcgccggcgacagagctcttcaagggcaagctgaagctgaaggacaatggctacctctggacggcgccggattcgaccgcgacgtcggtcgagggcatctacgccgccggcgacgtcaccgacgacaccttccgccaggcgatcaccgccgccggcatgggctgcatggcagcgctcgaggccgaacgttatctcacgggtcacatgcccgtcgcagtagctgcggagtaagatcggcatgagaggtggtggaatgccgttggactgggacaagctgcgtattttccacgcagccgccgaagccggttcgttcacgcacgcggccgacaagctgcacctgtcccaatccgcgatcagccgccaggtgagcgccctggagcaggatgtcggcaccaagctgttccaccgccatgcccgcggcctcatccttaccgaacagggcgaactgctctaccgcaccgcccacgacgtgctcctgaagctcgaaaccgtgaagatgcagctgaccgagacgacggaaacgccgtcgggcaagctgcgcgtcacgaccaccgtcggcctcggccagggctggctcaccgacaagattcaggagttcatgcaactctatcccgatgtgcagatccagctcatcctcgacaacgaggaagtggatgtgaacatgcgctatgccgactgcgcgattcgcctgcgtcagccgcagcaatccgacctcatccagcgcaagctgttcaccgtgcacatgcacgtctatgcggccccctcctacatcaatcgatttggcgagccgcaggcggtcgaggatctcgacaaccaccgaatcatcaccttcggcgaaccggcgccgaactacctgctcgacgtgaactggctggaagtcgccggccgctcgtccgacaacaagcgtattccgcacctgcagatcaacagccagacctcgatcaagcgcgcctgcctgctcggcatgggcgtcgcctgcctgcccgattatatcgtcggccgcgaccctggcctgattcagctgccgatcaatgccgacgtgccgtccttcgacacctatttctgctatcccgacgaaatgaagaacgccgccaagctcaaggctttccgcgacttcatcgtcagcaaggccagaaactggagcttctaactgttttcgtggcgacattggcagccgtgcaaagcgcgcatgcctgacatgcacaaaaattggttgccgactgcacattaaaacaccatatcaaccttagctgatgcatacggtggcttttcctcccagttccaccgcattagctgttcccctctggaggtttagaccttcatacctataaagggccccgaattttcggtggccctctttttttgccctgattttccgcaatgcagcaaaaaatgctgcattgcatagcaggcatgcgcaaaagggcattgaaatctgcccgccaaagcatcatatcgcactcagttgatgcacatggcggttctctcccagtgccgctgcattagctgttcccctctggaggttgaataaccttcacaccttaaagggccccgttcattcggtggccctctttttttgcttaaaatttaaccacgcaaaaaatcacaggcgccgttcgcgcatatcttgaacatcgaaaactgacgatccatatatcgaccagaagcgatttacggttcggcaaacgacgatggacaacgacgaaatcctcaaggcgctctcccatcccaagcggatggagatcctgaactggctgaagaatcccgaggagcatttctcttcgcaagagcacccgctcgaaatgggtgtctgcgccagccagttcgagcgctgcggcctctcgcaatcgaccgtctccgcccatctgggtacgctcagccgcgccaacctcgtcaccacgcgccgggtcggccagtggatcttctacaagcgcaacgaggaaaccatcgctgccttcctcaagcaactggcgcgggatctctgatccatgcgcccgtgctttcctcccatcaagcgcccccatccctcgaccgcgagcagagccgcaacgcctgatctggtcgaccgattgtcttcctgagcccccaaaccaccaccgaaaggactttccatgagcaagctcttcgaaccgacgaaggtcggcgacatcaccgtcaaaaaccgcatcgtcatggccccgctgacccgcaaccgctcgccgggcgccgtgccgaacgacctcaacgtcgaatattacacgcagcgcgcctccgccggcctgatcgtcaccgaagcgacggcgatcacccaccagggccagggctatgccgacgtccccggcctctacagcaaggaagcgctggatggctggaagcgggtgaccgacgccgtccacgcccatggcggcaagatcgtcgtccagatgtggcatgtcggccgcatctcgcacacgacgctgcagccgaacggcggcaagccggtctcatcaagcaacaagaccgccaagtcgaagacctacctcgtcaattcagacggcaccggttccttcgccgagacctccgagccgcgcgcgcttgaaaccgccgaaatcgctggcatcgtcgaggactaccgcaaggccgcccgcgccgcgatcgacgccggtttcgatggcgtcgagatccacgccgccaacggctacctgatcgaccagttcctgcgcgccgacatcaacgaccgtaccgaccagtatggcggctcgatcgaaaaccgcgcccgcttcctgttcgaagtggtcgatgcgatcaccaaggaaatcggcccgcgcgtcaccggcatccgtatttcgccggtcactcccgccaacgacgcatccgacgccgccccgcagccgctcttcggctatgtcgtcgagggcctcgcgaaatacgacctcgccttcatccacgtcatcgaaggtgccaccggcggcgaccgcaacttccagcagggcgacaagcccttcgactatgccggcctgcgcgccgcctatgaaaaggctggcggcaaggcaagctggatggtcaacaatggctatgatcgccagctcgccatcgacaccgccgagagcggcaaggccgacctgatcgccttcggcaagcccttcatcgccaaccccgatctcgtcgagcgtctcaaggccaacgccccgctcaacgatatcgaccaggccacactctacggcggtggcccgaagggctacatcgactacccggccctcgaaaaggtcgcctgaacatcaccaaagccttcgaaatcccgccacccggcgggatttctctttttggcccacgtcatttccctttccggccgcgaccggctagcatcccgccatgttcaagccctatctcgaccgctggcatctcacccctgacggcgagcctatcgtcacccactccagccacctcctgcccgtcctgtggcgcgacaagccggccatgctgaagctcagcgccgacgaagccgagcgatcgggcgccgcggtgatgcactggtggggcggtcacggtgcggcgaaggtctatcgccacgacaccgacgcaatcgtgcttgagcgagcccaaggcgaccgctcgctgctcgccatggcctcgtgcggacaagacgacgaggcaagccgcatcctttgcgacaccattgccagactgcacgcgccgcgccagacaccgaagccgccgctcattccccttgcccgatggttccgcgacctgactccggccgcctgcagatacggcggcgtgctcaccgattgccacgacatcgccgccgccatgctcgccgacccccgtgacgagaccgtcctgcacggcgacatccaccacggtaatatcctcgacttcgaggaacacggctggctggcgatcgatccgaagggcctcaccggcgaacgcggcttcgactacgccaacatcttcgccaaccctgaactttcgacggtcaccgaccccaatcggctgcgacgccaactgctggtcatatccgctgccgcgagtctcgagcccgagcgcctactgcgctggatcgccgcttattgcggcctctccgccgcctggtttctcggcgacgccatgtcatcggaagcggagagtccgctcacggtcgcccgcatcgcactcgcggaattgagccgacgctagtctagccacgcggcgcgaccgcttcctcggtctcaccagacgtcggcccctcaaggcaacccagcgagcccagtgtcgccttcacggcctcatcgattggcgtgcgcggctcgacaccgagttccgccaccagccggtcattgctcatccggaccggctcgcgccagagatagcgcatctccttcagctctcgcatgaaggtcacgaagggtgcggccagcggcacggcgaaccagggaaagctccgcaccttcactcgcccgccagcggcgcgcctgatcgcctcgaccatctcttgcccgtcacgatcccagaagccgtccatatgatagacggcgaactcaggcagccggtcgcggcgctcgaccaattgcaccatggtttccgcgacatcgggcagataggcccactgatgccccacccccttgcgcgccggattggttacggtggacacgggcttgtccggcgtgatcatgccctgcgagaaccagctgctccccgcgcccggcccaaagaaatcgccggccctgacgatgatcacgggagccccatcccgcgatccggcctccagccgcctctccatctcgacgcggatgccacccttcctggtcagcggatgctgcgggctatcctcgcgaagcacgggaaacgcatccggcccgaaattatagaccgtgcccgggagcacgaccgttgctccgaccgctttggcggaagcaatcgtattgtcgagcatcggcagcaccagcttttcccagtcgcggtagccgggcggattgacggcgtgcacgatcaggctcgcccctttcgcggcggccatcacatcggccgcacgcatcgcatctccctgaacccagttcaaacagggctcggcggcgcgcgccttctccgcattgcggttgagcgcccggacatgccagccacgagccgagagcttgcgggcaaccgcgccgccgatgccgccggttgctccgagaacaagtgcgatctgctgtgtcatcatcgtctccatcgtttgatgatgtgatgatgcgctcaagcgccaataaacgaaattgacgaaattcgtatctcctctatacatatttgaatgacgacagagccaagctgggatttctaccgcacgcttctcgccgtgctcgaccacggctcgctatcggccgccgcccgcgaactcgggctgacgcagccgaccatcggtcgccatgtcgacgcattggaagagatcgtcggcttccccctcttcgtccgctcgcaaagcggcctgatgccgaccgaagccgcccttgaactcaggccttacgccgaaacgctggcatcgacgtccgccgcccttctgcgcaccgcctccggccaccgcgaccgcgtcgccggaccggtccgcatcagcgccagcgaagtgattggcgtcgaggttctgccctcgatcctggcacctgtgatgcggcgatacccggaactcgagatcgagctttccgcctccgacgccgtcgaggatctgctcagccgcgaagccgacatcgccgtgcgcatgagcgagccggcgcaggacgcgctcgtcgtgcgccgcatcggtgacatcccgctcggctttcacgcccatcgccgctatctcgaccatcgcggaacaccacaaacgctagccgatctcgagggccaccgcctgatcggcttcgaccggcaaaccggctatgtcaggacgatgttgaaacgctatcccgtcttcgccgacctctcattcgacttcaaggccgacagcacgctggcgcagctggcggcgatacggtcgggtctggggataggaatgtgccagacggggctcatggcgtcggacccggatattgtccacgtcctgccgcgggcgttccaaatcccgcttgcgacctgggtggtgatgcacgaggcgatcaagacctcgccgcgctaccgcgtcactttcgatgcactggtcgcgggcctgctcgattatatcggggagaaagcgctcgtccgccgggactgacggaacgcctcatgaagggtgtgatcggtcaggcgcgcggcgacgtggcgggctggtgggtcttccagttgccgtcgaccacctcggtctccggacggtcgccaccttcggcatattcctcgtgccacttgcccttgtcgtcctgccagctgatctcggccgaatcgccgccgacctgctgctcggccgcgacgatacgggccgcctccagcgcttccgaatgtgtcggaaaggcctcggaatacacgtcaccaagccggtaggcccagccgccatcgtgctggacaacttcatagaccaccttgaccatgcacttcactcctcttttgcctgttcaacacccggagcgaccggattggatccggttccgcgcggtgccatctggcaaaaagacgagaggcgccgcgatatgcttccggctgaccgatgaggcagtattccattaaatgtccaagactgcaaacctgccccgggggaccgccgacttgatatgtgaaatcatcgccttagacttgatacatgaatcaagaccggagccggaccttggggatcgcgtcacgcctgaaaaccgaacggtacctgctcatcgcgattgccatcggtctgttcgcctttctgtccgaacaggcgatcatggagatgggccgaggggcggcgctgattgccgcggtcgcgctcgtggtgaccatcgtgctcgcctccatgcgtgtcgcccatcacgccgagatcctcgccatcaaggtcggcgatccctatggcacgatgatcctgactctttcggcggtcgccgtcgaagtcatcatcctcgccatcatggtggccgacgaaagctcgccgacgctggtgcgcgacacgatctactcggcgctgatgctcgatatcaacggcattctcggcctcgccgccctgctcggcggattgaagcacggcgaacaaccctataacgacaattccggcaagacctatggcgtcatgatcctgacggccatcggcatttccatgatcgtcccggaattcgtgccatcggacaagtggcactactactcggccttcaccatcgtcgcgatgatcgcgctctacaccctcttcctgcgcatgcaggtcggccagcacagctatttcttcagctacagctacccgcgcagcgagcgaaaggcggaggcttcggcgcctcatcccgacgaaggatcgacggccgtatcgatcgccaccattctcgcgggcgtcgtcatcatcggcgtgctcgccgaattcatgtcggccttcatgacgacaggcctcaaggacacaggcgcgcccctcggccttatggccctcgtcgtcgcggccatatccgccgcgcccgagatcctgaccgcgctccgcgccgcgctgaggaaccgcatgcaggcaaccgtcaacatcgccatgggcgcctcgctctcgaccgtcatcctgaccgtgccggtcatggaggcaatcgcgctttataccggccagcccttcatcatggcgatgacgccggtgcagacggtgatggtcacgatcaccctgatcgccgccgccatcaacctcaacgacggcgagaccaatgccatcgagggcatgacccatttcatcctgttcgcaacgttcctgatgctgaccagcctgggattatagtatgaaattcaacagattgggtgaaagatcggaatcgatttggcaagacacccgatgttgatcgagcgcgtccactagatccggaatgccatgggatggtcgacaagcagccggtcgatcgtcacgagttgcagcccctcgacttggcattgggccagaagcaggcgatcgaagggatcgcgcgtgagcggttccggctcggctgccgtgatgacatgagggatatcgatacagacaatcgccagcttggcttcctgcaggaagcgcgggattttctccaggggcattccaggttcaagtttaccaagtctcgtcttgatcgagatttcccagaggctcacgacgctgacaaaagcatcttctctcccctgtgaaaacagactgtaatatcgcggatatctgacctcgaactcctgccgcatgaaagcgaggacaaaatgagtatcgaggaggagcttcatttgtccggcagcggcctcaacaggaagtcttcaggcaagggatcatcgaagtcatccgcaatgtagggaacggcatccgtgacgccgattgagcgaagataggcctgaccggcttcccaatctatcccgcccttcttttgagacgcgcgctccatgcttcgcggcacgatatcaaacaccggccgaccgtctcgtgtgacggtcacggtctctccctgctccacatcatgggcaagctcttcgaaacggtcctggacttcacggatggacatcgtcttcatgaagaaaatatatgtccggccgctctcacggtcaacgtggccgcttgaacgcgaaaggcccaccattgctggcgggccttgtgatttccgtcgtctgtcggacgcttacttgcaggcgccgcagaagcgctggatgcgcttgcaggcttcttccagcagttcttccgaggtcgcgtaggagatgcggaagttcgggccgagaccgaaggccgaaccgtgcacaacggcgacgccttccgcttccagaagctcggacacgaagtcctcgtccgtctcgataaccttgcccgtcggcgccgtcttgccgatcaggccggcgcaggacgggtagacgtagaaggcgccttccgggttcgggcaggaaatgcccttggcctggttcagcatcgacacgacgaggtcgcggcggccttcgaagatcttcttgttctcgggaatgaacgcctgcgtgccgttgagcgcctcgacggcggcccactgcgcgatcgacgatgcgcccgaggtctgctggccctggatcatgtccatcgccttgatcagctggatcgggccggccgcgtagccgatacgccagccggtcatcgcgtaagccttggaaacgccgttcatggtgagcgtgcggtcatagagcttcggctcgacttcgacgggcgtgacgaacttgaagtcgccataggtcaggtgctcgtacatgtcgtcggtcagaacccagacatgcggatgcttgagcagcacgtcggtgagcgccttgagttcgtcatgcgtataggcggcacccgacgggttggacggcgagttgaagatgaaccacttcgtcttcggcgtgatcgccttgtcgagatcttcagcctggagcttgaagttgttttcctgcgtcgtcatcaccgtgacgggcgtaccgccgcacagcgccaccatctcgggatacgacacccagtagggcgccgggatgacgacttcatcgccggcattcagcgtcgccatgaaggcgttgaaaagaatctgcttgccgccggtgccgacgatcgtctgctcccaggagtaatccaggccgttctcgcgcttgaacttcgcggcgatcgccttgcgcagctccgggatacccgaaaccggcgtgtacttcgtctcgccgcggttgatcgcgtcgatcgccgcctgcttgatgttgtcgggcgtatcgaagtccggctcgccggcgccaagaccgatcacgtcacggccttttgctttcaactcgcgcgctttctgggaaacggcgatggtggctgaaggcttcacacgggaaagagcatcggcaagaaaggccatgatatcggtcctatacggttgattttagcagacggccggggccagaattctgcgctacggtctatgtccaatgtaggcaggcttttcaaggccaaacgcgtgatgaaaacgatgattcttcgtgatcattcgcgtcatcgggatcgagattggcgttgtcgaacctcgcctgcccggcaccatcccgatttacgccctgaaatcaaaaccttcgccggatcggccctttcgcgaacgaccggcgcggttcaggccgcaaacacaatgccgttatcccccaccctttaaggcttgaagccaggcgccccgcccccaagtctcaggcagcgatgatggatttgcattggtgggatggacgatgacagcagtttcgacacttcggctcggtgtgatgctggcggcggtagcggctgtcgcccagtcgatccccgccatggcggccgacacggtcgacaccaaaaaggtgcgggttcaggtcgaaacgatagcctcggggttggaaaatccatgggcggtggcggcccttcccgatggcggctatctggtgaccgagcgcccggggcgtttgcggatcgtcagggacggcaagctctccgcgccgatatcgggcgtacccaaggtcagcgccagaagccagggcggcctgctggatgtggaactggcgcccgatttcgcgacgtcgcgcgttctctatctcacggccgcgaccgtcggcgacggcggctcgggcaccgaagccttcagcgccacgctttccgacgatggaacggcgctagagaacgtcaagtcgatcttcaagatgcgcaagttcaccagcgccggcctgcagtatggttcgcgcatcgccatcgccagggatggctcgctcttcatcagcgtcggcgaccgcggcgatcgcgaccgctcccaggactggggggacgatgccggctcgatcgtccacatcaatgccgatggcagcatccccgccgacaatcccttcaaggacggaggccccctcaaggacggcgggaagccgctgccggaaatctggtcgaagggccacagaaacccgcagggcatcgccttcgacgccgcagacggaaagctctacaccgtcgagcacggcgcgcgcggcggcgacgagatcaacggcatcgagcccggcaagaattacggctggccgatcatcacctacggccgcgactattccggcgtcgagatcggcgaaggcacggccaagaaggggctggagcagccgctctattattgggatccctcgatcgcgccgggcgcgctcgccatctatcgcggcaagatgtttccggaatgggatggcgatttcctggtcgccgccctgaagttccagatgctgtcgcgcatgcagcgcgatgacagcggcgccttcgtggccgaggagcgcatgttcgacggcgcctatggccgcatgcgcgacgtcgtggtcgcccccgatggcgcgctcctgatcgtcaccgacgaggatgacggcgcgctgctgcgtgtctccagggcacctgccgacaacggctgatctgtcgggcggctgccttgccctctttagaagcaactgctaacggtcgcgtcatatcagaccgcttgccctcttcgtgaaggtcaagcctcccgacatcgagatgatgatgacgcgcatacaggcgaaccttgttctattgctggctggcgccatatggggcggcggcttcgtcgcgcagtcgacggcgatggacacgatcggtccgctctggttcgtcggtctccgcttcgccattgccaccatcgccgtgctccccttcgcactgctcgaggcgcgcaagagcgaggtcaagaccaccaggcggcatggaatgctctatcttctgatcggtctgaccctcttcggcgtcatgatcacccagcagatcggcctccagacgacgaccgtcaccaattcaagtttcctcaccgggctctacgtcgtgatcgtaccgatcatcgccgtggtgttcctgcgccgggcgccgcactggatcgtctggccgggcgccttgatggccctgaccggcatctatctgctgtcgggtggcgacatgtcggccctgtcgcgcggcgatatcctgacgatcttctgcgccgtcttctccgccgggcagatcacgcttgccggcatcatcgtctccgagaccggccgggccttgacgctttcgatggcgcagtttgccgtcaccgccgtcgtggcgctggccgcggccgtcattgtcgaaccgatcagctgggctgcgatccgggacgcggcgccggagatcctctatgtcggcatcttctcgtctggcatcgccttttcgctgcagatcatcggccagcgctacaccacctcctcgcaagcggcgatcttcctgtcgtcggaagcgctgttcggcgcggcactcggcgccgtggtgctgggcgagaagatttccactctcggctatgtcggctgcgcgctgatgttcgcggcaatgcttctagttgaaatcgtccccgaaatagctcgccgacgtcgtcaaaacggcctgcttatcagccagaatccgggctgaaacagaaaaagtgaaaaaaagtttaacattcgcgaggtcgcgcgcacgttgtaattttggcaaaatctgctcctaaaatatattgctcacgatacaaaacgttgatcagcggcggctgatgagcgttttttttcgttagagcgcaaaacccacccggaattggcgcgcggggctgcgttgcgtcagaaaacttttgcttgccaaaagtgaataatcgcagcaatctcgtggcgttcgggcattttgcgagcatgggaagtccttaagaatgtgcgcgccggagacgctaatactccggtcggctgggtccagaaagcaggcgtaagttctgcggagaaccgggctgatttagaggggacctttttctcaccattcaataattgcctgctagcgtctccgtgaggaggcaatatcagtatgctgcccgtgtggatggcgggcagagatcaaaggacctgacgcatggccgagactgggactgtaaaattcttcaacaccgacaagggcttcggcttcatcaagcctgacaagggcggcgcggacatcttcgttcatatttccgccgttcaggcttccggattggccgggctgacggagaaccagaaggtaagcttcgacaccgaaccggatcgtcgcggcaagggcccgaaggccgtcaacctgcagatcgacggctgatagagcaagccttccaatcgcgttgaagcccggcgggtcgccgggttttatcgttcagcctgcattcagacgccagccgctaacttgccatcatcaaggtgcaaaaccggctaagagtttgaacaggacagaacacatgaatagccttgccaagaccctttttctgacggcaaccgcggctgccatcaccttctcgtcgatcggcgccgcatcggctaacgactggcgctatcgcggccacaacaacaacaacgacgctttggtcggtggtgccgttggccttgcaaccggtttgatcgtcggctcggcgatcgccaatgcgccgcgttacgacgaaccgcgctatatcgatccgccctacgcctatgacgacgtgccggtctatcgtgcgccacctccccgctattacagacccgctccggtgcgctactaccagcctgctccggttcgcgtcggcgtcgagccgtggaccccgcagtgggagcgttactgctcttaccgctaccggtccttcgatccgcgcagcggcaccttcatcggcaacgacggtcgcagccacttctgcgtcgccaactgatcgaactgagatcgggaatgaacgaagcgccgcttttcagcggcgcttttgttttgcgcgacgtcttttgccggcctgatcaaagaccctgcagatagggattgccgcgccgctcgtcgccgatccggctgcccgggccgtggccgcagatgaaaccgacctcgtcgcccagcggcagcaccttgtcgcgaatggaatcgagcaactgctggtggtttccgccgggcagatcggtccggccgatcgagccgttgaacaggacgtcgccgacatgcgcgaacttctgcgcccggttgaaatagatgacatggcccggcgcgtggcccggcgtgtgatagacctcgaacacatgttcgccgaaggacacggtgtccccatccttcagccagcggtcaggctcgacattgcgcatgcccccggccggcagcccgtacttctccgcttgcgtctcgatccgctgcagcagcggcaggtcgtcctcgtgcggaccgatgatgtcgacaccaagcgcttccttgagctccttggcgccgccggcgtggtcgagatggccgtgggtgagccagatggccttgatcttgagcccattctgctcgatcccctgcaggatattcgcgacatccccgcccggatcgatcaccaccccttccttcgtgtcctgatcgaaaaagatcgtgcagttttgctggaacgctgtcaccggaatgatcccggcctggagcatgctcatggggtgcctcgctttatgtcttgcgcagttcgtcggtgttgaaccgggtatagtcgcaaattccggcgcatgcagcctcgattttccgcaggggcccgtcacgctgcaacgacaagtgtaatgtgctgtgatcgcctccggcggaacctccccttttcccgggcgttaccaacccgtctataaaaggagacccacgatgaccatgaagcgaaatcttttcctggcaggcgcaatggttctggcttccgccggcctcgcccgcgcggaaatggccgcaacggccatcaacgatctgaccattcacgccggccccggcacccagtatcccaccgtcggcgttgcgacgcgcggttccgaaaccatcctcgacggctgtgtcgccggcagccagtggtgccgcgtcgatgtcaacggcatgcgcggctgggtctatgcgcagtatctgcagatggaccgtggcggcacccaggtgatcgttgatcagaaccaagccgatctcgatattcccgtcgtgacctatgaaaccacggccgcgaccggccccgccgaacccgctccgggcgacgaactgctcggcccggtcggatcggtcgagaccatcgaaccgccacagacggtcaccacctacatcgagagcaaccccggcagcacggtcgaggtcggcggtgacgtcgtcgtcggcgcgcaggtgcccggtaccgtgaccttccaggagatccctgactatcagtaccgttacgcccgtatcaacgaccgtccggttcttgtcgatccgggtacgcgccgtatcgtctacgtctacaactaagacgtgacgagacctgaattcaccaagcgaggcggccacccggccgccttttccatgcacgcttttgcgcgacgcaactcacccgtacgcctctcccgacgagcagccggatgcgacgcgattgtgaactcgcgacggcgcttgcgtcatgcctgttgattgttgccgcaaatatgcctcttaatccgatcacgcaggggaattgcgtatcgcatggggaattttgcgcgggcgcaactcggttttcgtaacaacgccgatatctttgcacgcgcgaaagccggacgccgacgggcaccggaatatatgtcatgattgctgacatatattcccgcgtcccggcacgcggcgacaagcaggaaaggaaatgccgaattggcacgacagagcagcccgaaagccggcaggcgggagcccaggccggagcctttgaccaagccgttggaaaacaccgaaaccatcgacttcgatatcatcgagctcctgtttttctcctatcgggacttcgtctccgatcctgatgcgatcctcgccaaaagcggtttcggacgcgcccatcaccgcgtggtgcatttcgttaaccgaaaccccggcatgaccgttgccgatctcctggatacgttgaagataaccaaacagagtctcgcaagggtactcaaacagcttatcgattcggggtatattcaacaaaaagcggggcctgaggaccggcgccagcgcaagctctatcccaccgcgaccgggcgggatcttgcgcttgcactcgccgagccgcaatcgcgccgtattgagagagcattcgacggagcgtctccggaagtaagggccggcgtcaaggccttcctgagtggcatgcagaacagacaaaactcgaaagcggactgaatggcggcgaagatactgatttcggacgatgcggcacacttgctcgttgtggatgacgacacgcgtattcgcgcgctgctcaaccgctatctgagcgagaacggcttccgcgtgacggtcgcggccgatggcgcagaggcacgccgcaagcttggcggcctcgatttcgatctgatcatcatggacgtgatgatgcccggcgaatccggcatcgacgtcaccagggatctgcgcatcatcaagaacgtgccgatcatcatgctgacggcgctcgccgaatccgacagccgcatcgccggcctcgaggccggcgccgacgattacctccccaagcccttcgacccgcgcgagctcgttctccgcatcaacaatatcctgcgccgcaacgtctccggcgacgcgccgaagatcgagcaggtgatgttcggcccctacacgttttcgctgacccgtcgcgaactgaagaaggcggccgaaatcgtgcgcctcacggatcgcgaacaggaaatcatgctgctcttcgccaagcgcgccggcgacaccattccgcgccatgaactgatcggcaacgatgtcgatgtcggcgaacgcaccatcgacgtgcagatcaaccgactgcgccgcaaaatcgaggacgatccgtcaaatccggtctggctccaaacggttcgtggtataggataccggctgagcatcgattgaagatccgggaccccgaaaggctctaagattagatggtgacattcgactccttgagacgcgaggaccgctcgccggtttccggctggcgttggtttacccgcctgctgcgccgccagcttcccaagggcctttatgtccgctcgctgatcatcatcatcatgccgatggtgctgctgcagtccgtcgtagccgccgtcttcatggaacgtcactggcagatggtcacccagcgcctgtcgatggccgtgaccgccgatatcgccgcgatcatccagatgatcgacacctatccgcaggatacggactacagcgaaatcacccgcatcgcccgcgaccagctcagcctgcagatctcgatcgagcctgacggcgagctgcccccgccccgcatcaagccgttcttctccattctcgacggcattctcagcgacgagatccgcgatcagatcaagcgccccttctggattgacacggtgggcgattccaacctcgtcgagatcagggtgaagctcgacggcaagatcctgcgcgtgctcgccaagcgcaaccggacctacgcctccaacacccatatcttcatcgtctggatggtcggcgcgtcgctggtgctgatcaccatctccatcctgttcctcaggggccagatcagaccgatccagaaactcgccgccgccgccgaaagcttcggcaagggccagaaggccgacaacttctatccgcgcggcgccgacgaagtccgccgcgccggcctcgccttcatcctcatgcgcgagcgcatcgagcgccagatggagcagcggacggcgatgctcacgggcgtcagccacgacctgcgcaccatcctgacccgcttcaagctgcagctggcgcttgccggtgacaatcccgatcttcagggcatgagcgacgacgtcaacgacatgcagtcgatgctggaggcctacatggccttcgcccgcagcgaggtcgaggaagatgtcggcgagctcaagctcagcgaactgctgctgaagctcgagcccgacttcgccctgcacggcaagacgctcacccactcgatcgagggcgacgacgacatccaggtcaggccgaacgcgttcacccgtctcgtcaccaacctagcctccaatgcgcgccgctacgccggcaccctcaacatcgaggccaagcacggcgccaagtggctgaccatcaccttcgacgacgatggccccggcattccggaaaagaaccgcgaagacgtcttcaagcccttcttccgcctcgacgaagcccgcaatctcgatgcgtcgggcaccggtctcggcctcgcgatcgcccgcgacatcgcccgcagccacggcggcaacgtcacgcttggcgatagcccgctcggcggcctgcgcgccattatccgcgtcccggcctgagatcacgatggcgatcgataccaccgacatgacctggctcaacccgccgcctttcgccgagcagcgcgaagacggcctgcttgtgcgctccggcgagaagaccgacttctggcagggcacctattacggctttcaccgcgacgatggccatttccttcatcgcccccgccgcggcgactttaccgccgaggtcagtttttcggcaaattaccaggcgctctacgatcaggcgggcatcatgctgcgcgccgatgcgacgcactggatgaagtgcgggatcgaatataccgacggtgcccgccatttcagcgtcgtcgtcacgaatggcaattccgattggtcggcttttagcatcgaccatgattttgaaaggatcgccgtgcgcgtgacgcgcaatggcgatgcgctgttcatccagtacaggacggacatgatggcggactggcgcatggcgcgcctcgcctggttcgacccgaagcttgaggaattgatggtgggcccggtcttctgctcgccgcagcgcgccggcttcgaagccacgtttcacgatttcggcctgtcggacccgctctcgcgcgacattcactgaagacaccggcaccgaaacgccgggcgcaaggcctcggcgctgcgccgatcacatgatcttctttccgttcgggaccggcttgtccggcgccgcgagcacgatggcgccggcctcgtcctcgaaaccgagcgtcagcacctcggagcggaatggcccgatctgtcgcggcgggaagttgacgacgcacaagacctgtcggccgacgagatcgtcgagcgtatagtgcacggtgatctgcgccgaggacttcttgacgccgatctccggcccgaagtcgatcagcagcttgaaggccggcttgcgcgcctcgggaaacggattggcctcgatcactgtgccgacacggatgtcgacccgctcgaaatcgccgtaggtaatttcttcggtcatgaaaatcagcctcagcccgcgagttcctcggcgcgcttgcgcgcggccgaaagcgccttgtcgaacagcggctgcatcgcatcgtcagccatcagcacggagagcgccgccgccgtcgtgccgccgggcgacgtcacgttctggcgcagcttcgatgcgtcgtcgggggactggtgcaaaagctcaccagcccccgcgacagtttcccgtgcaagccgcatggcaaggtccgcctgcaggccaagtttgcggcctgcttctgccatgcactccacgagatagaacacatacgcaggaccactgcccgaaagggctgtaacggcatcgatatcggattccaaaggcacccattccacgggtccggagaccctgagcagcgcgtgcacctgatcgcgctggttctggccgacgcgctggttggcgtaggcgccggtgacgccacggccgaccatggcgggcgtgttcggcatggcgcgaaccatcgccgcttcgccgagatgcgtttcgagaaagccgagcgtcttgcccgccgcgaccgaaaccacgaccgtatcggcgccgacggcgcttttgacggatggaagcaccgcgtccatgacctgcggcttgaccgccagaaacagcacgccggccttcaattcggagggaagcgtcgtcacatgcctggcgcccgcctcgctgataacagccatcatctgggccgaggggcccggatcgacgacgaccacggaagcaccgggcacaccgttcttgagccagccggagagcatcgcgccccccatgttgccggcgccgacgagaacgattggacccgaggacgacagaccggacatgttacgcttcacccacggtttcgaacagaacggcttccatggcgcggttggcgtccatgccggaccagatcacgaactggaatgcctgataataagcctcgcaggtatcgagcgcgctggcgagcagcacctcgacctggcggttcgtcggctcggcgccgccggccagcagcagcgactgccggaagatgaccacgtcctcctggcgccagacgtcgaagtggcccatcagcacctggccgttgataccggccagaagcttcgtcacttcattcatgcgctgttcgggaatcttgatgtcgaaggcgcagccgagatgcagcgcctcgaattcctccatccaggaaaaggagacgtgataatccgtccacttgccctcgaccgtcatcgcgatttcgtcgtcacccgaccgctcgaaagcccagtcgttgtgggcggcgacgtactcgatcgtatcgaccgggttcgactgacgctcgacttccaattccatgaggctcatgcagcaccttcttgaccggagtgaatgcgtaacgacttcgtccaacgagacacaagcgaacacacgcaaaacccggaaaccaccaacccagatgaccgttgaaccgctaccagacttacgcagcgaacctgcccggagcttaccaactgcttcgaatcatcatttaaaatcagtgtataacgcacccggtggtgtgccagccccctgagggccgttttcgggaacgccactgtggaaaggtgttgggaattggattcagaaggagggtataaacgactctgcccattggcttttttggcagtgtccacaggtggaaaaacacacccgcttttttagccgaagcagcggtgtgtctctcaaaggccacaccgcgccatgtccctaaacgggattacttgcccttggcggcgggcttggattcgagcttcgcctcgagcgcggcgatacgtgccagaagcgcgtcgttttcgtcgcgcgccttgatcgccatctcgcgcacgacctcgaactcttcccgcttgaccacgtccatgctgttcagccagcgctcggcctgggcattgaacatcgtttcgacttccttgcgcacgccctgggcggcgcccgcggcatcggtcatcagcttggcgaactcgtccatgatgcggtttgtgcctgtcgtcatggcggtttactccctttgaaagaatgctttcggccgctctcggccctcggcactgaggtagggcttcgccgttaaggatgcaagcgctttgcactggataagcggtcgcacctatctcgcatcactaacaatcaacttgaccggctggtgtcgcaaggccatcttccgcccacatcaacggatgggacgaccttgccgacagctgccaacttcatggctatcatgccttttcccaatatcgacccgatcgccttcgccatcggacccgtggcgatccactggtacggcctggcctatgtcgccggcatcatgatcggctggtactacgcccgcatcatcgccggaaacgacagcctctggcccggcaatgcctcgccgatcaccaaggcgcagctggacgacttcgtcgtctgggtggcgcttggcgtcgtcctgggcggccgcatcggctacatcctgttctacgacatggcatcgatcatcgagagcccgatccgcgccatccagatctggaacggcggcatgtccttccatggcggcctcgccggcacgacgatcgccatgatcatcttcgccaagcgcaacaagatcccgctctggaacctcttcgacatcgtcgccgccgtggttcccgtgggcctgttcttcggccgcatcgccaatttcatcaacggcgaactctggggccggctgacggacgtgccttgggccgtggtctttccgaccggcggccccttcgcgcgccacccgagccagctttatgaggcgggccttgaaggcatcgtgctactcctcgtgctggccgccctcatctatggcgtgcgggcgctgaagacccccggcttcgtcaccggcgtcttcgtctgcggctacgccctttcgcgcatcttcgtcgagttcttccgtgaaccggacgtacaactcggctaccttctcggcaccaactggctgacgatggggatggtcctgtcgtcgccgatgatcctgctcggcctctgggccatgatccgtgcccgccttcaggctgctccgcagtcctgatcgcggctccggaggaggagaacatgaccaccgcactcggtgagaagatcaaggcgatcatccaggcgaacggtccgatcagcgtcaccgacttcttttcgctgtgcctcgccgatcccgaatacggatactacaagaccagggaacccttcggcagctccggcgacttcgtcaccgcgccggaggtcagccagctcttcggcgagatgatcggcgtcttcatcgtccacgcatggcagcgccacggcacgcccccgggcgtgaagctggtcgagatcggcccgggacgcggcacgatgatgtcggacatgctgcgcgtcatcgagcgtctggcgccgccgctcttcgaaaccatgaccatccacctcgtcgagaccagcccgcgcctgcgcgaggtgcagcaggaaacgctcgccgcccatcagggcaggatcagctggcacgacggcttcgacgagattccgcccggcctcaccctgatcgccgccaacgaactcttcgacgccatcccgatccgccagttcgtcaagaccgcgaccggctttcgcgaacgcatggtcggcctcgacgtcgatgacgagctctcgtttggaaccggcgtcgccgggatcgacccgcggctgcttcccgagcaggccgcgagcgttcccctcggcacgcttttcgagatcgcccccgcgcgcgaatccgtgatggtcgccatcgccgatcggctcaaggccttcggcggcacggcgttggcgctcgactacggccacctgatcaccggcttcggcgatacgctgcaggcggtacgcatgcacgaattcgacccaccgctcgcccaccctggcgaagccgatctcaccagtcacgtcgatttccaggctctcggcgagaccgccgtggcagccgggctccacgtcaacggccagctgcatcagggcgacttcctggtgggcctcggcatcctcgaacgcgccgccgccctcggacgtgatcgcgaaccccgcacccagcagatcatccaggccgccgtcgaccgcctggccggcgaaggcgagggaaagatgggggaactcttcaaggtgatggccgtttcccatcccgccatcgatctgatgccgttccgttccgtggattgacagggcgcgcgcggcggggtcaacatcgccgcaatcgacagcgcttcgtccggcacaccgtctgggcgtcgctaaaacaaatcgtggaatgaccgatgacacatgcgccctccccggaaccgatccaaagcgcgctgctgaacgaagcgaccggcgacaccatccagcacggctatttcacccgccagggcggcgtctccgacggcatctatcgaggccttaatgtcggcctgggctccagcgacgaacgcgccaaggtcgaggaaaaccgcaggcgcgtcgccggctggttcgacctgccggtcgagcggctggcaaccgtgcaccaggtgcattcgcccgatgtcgtggtggtcgacgcctcctatgacggcacgcgccagccggccgacgcgctggtgaccgcgacacccggcatcgcgcttggcgtgctcgccgccgattgcggcccgatcctgttcgccgatccggaaaacaaggtggtcggcgccgcccatgccggctggaagggcgcattcaccggcgtgctggaaaacaccatcgacgccatgatcgggctcggcgcccggcgcgaggcgatcgtcgcctgcttgggcccgtcgatcagcaaggcgagctacgaggtcggtcccgaattcgtcgagcgcttcgtcagcgaaaacagcgattatcagcgctatttcaccccgtctcagaagcccggacatgcgatgttcgacctgcccgcattcaccatcgatcggctgcgtgccgccggcgtcaaggcggaaagcctcggcgtctgcacctaccccgacagcgaacgcttcttttcctaccgacggacgacacacagccaggaaccggactacggccggcagatttcggcgattgccataagggagatgtgaccggtatgggcctacacttcgaaacctccgaattcgccgaccgtctcgcgcggctgacgcagcagatgcaggaggagaagctcgacgccctcctcctcttcgcccaggaaagcatgtactggctgaccggctacgacaccttcggctactgcttcttccagacgctcgtcgtcaaggccgacggcaccatggcgcttctgacccgttcggccgatctgcgtcaggcgcggcagacgtcgatcatcgaaaacattcatatctgggtcgatcgcgtcaacgccgatccgaccgttgatctgaagaaccttctggtcgagatggacctgctcggcgcgcgcatcggcgtcgaatacgacacgcatggcatgaccggtcgcatcgcccggcttctcgacacgcagttgatggcattcggccagatctccgacgcatcctatctcgtcagccgtctgcgcctcatcaagagcccgacggagatcgcctatgtcgagcgcgcggcggcccttgccgacgacgcgttggatgcggccctttcgctgacgaaagccggcgccgacgaggccgcgatccttgcggccatgcagggtgccgtccttgccggcggcggcgattaccccgccaacgaattcatcatcggctccggcgccgatgccctgctctgccgctacaaggccggccgccgcaggctcgacgccaacgaccagctgacgctggaatgggccggcgcctatgcgcattaccacgccgcgatgatgcgcacgatcgtcatcggcgaaccgagctatcgccaccgcgaactctacaatgcctgcctcgagaacatccaggccatcgaaacggtgctgaagccgggacatacgttcggcgatgtcttcgacgtccattcgaagatcatggaggagcgcggcctctcgcgtcaccgcctgaacgcctgcggctattcgctcggcgcccgcttctcgccctcctggatggaacaccagatgttccacgtcggcaatccacagccgatcgtgccgggcatgccgctcttcgtccacatgatcatcatggattccgacagcggcacggccatgactctcgggcaaacctacctgacgaccgacgacgagccgaaggcgctgtcgcgtcatccgctcgacttcatcaacctatgagtgacagccgattataatcggcaattgacatctccatgccccgaccgccataaagttggccggggcatatgccgcgtggcgacacgcgcactgaagaaggatgacacgagggatgacgcgacttgcgacagcgtccacgctcatcgcctgccttgccctgctttccgcctgcaacaccacggatgccctgacccccctcgtcgacatcggcgaaacctcgggcagcatccgttcgacgccggtcacccagggcgaggtcgagcgcatggcaggcacgccgcgacgcggccagaccttctcgtctccgccgcgtgagggcggctatcacccggcctatgtggaacaggacgcccggcccggctccggcgcaccgccgacgaccatgcaggcgcaggcctatgcgctcgacggccagaccgagcagccgcgagcctccgccgccatcgagagccagcccctttccgagccggtctccgagcccgcttcggagccggtatcgaacgcgcaggccgaagagcaggacatcgccgacgcagaggcgaaggacaaggtggccgagccgaagcgcaccgcaatgctggcgccatcgggcggatcgagcgtacgcttcctgccgatcatcggcgcgccggttcaggccgtcacgcccctgtcgcggcaactcggcgccgaagcgcgctcgcacggcctcgcgatcaagagctccaacgacaacagcagcgcctacatcctcaagggttacctctcggccttcaccgacagcggcaaggtaacggtggtctatgtctgggacgtgctcgacaacagcggcgcccggctgcatcgcatccagggacaggagagcgttccgtccgaagcgcaggatccctgggccgtggttccggcctccgtcatgcagcagattgcgtccaagacgatcagcgaattctcgtcgtggcgggatgcccgtggcggttaagccacaagctttttggaaatataaaggcgcgagtcgcctttgcccttgcattcgggaacaagctggctaaaaagcgcggctatcagcaggcaacaggcggaccaagatgaaggttttcgcaggcaattcgaaccggcacctcgccgaagagatctgcaactatcttaatgtgcccttgggcagagcaacggtccgaagatttgccgaccaggaaatcttcgtggaagtccaggaaaacgtacgcggcgaggacgtgttcctcgtccagtcgacgtccttcccgacgaacgaccacctgatggaactgctcatcatgatcgatgcgatgcgccgctcgtcggcccgccgcatcaccgcggtccttccctacttcggctacgcacgccaggaccgccgcgcttcgggccgcacgccgatctcggccaagctcgtcgccaacctgatcaccgaagccggggccgaccgcgttttgacgctcgatctgcacgccggccagatccagggcttcttcgatatcccgacggacaatctgtatgccgtgccgatcctgacgcgcgacatcaaggccaactacgacatctccaacgtcatggtcgtgtcgccggacgtcggcggcgtcgtgcgcgcacgcgcgcttgccaaacgcctcgactgtcttctggcgatcgtggacaagcgccgcgaccgcccgggtgaatccgaagtcatgaacatcatcggcgacgtcaccggcaaggactgcctgctgatcgacgatatcgtcgattccggcggcacgctctgcaacgccgccgacgcgctgctcgccaagggcgcagccagcgtcaccgcctacatcacccatggcgtcctgtcgggcggcgcggtgacccgcatcaccaattccaagctgcgggagctcgtcatcaccgactcgatccagccgacgacggccgtccagtcggcgcacaatatccgcgtgctgaccaccgcgacgctgatcggcgaagccatcaaccgcaccagccaggaagaatccgtctccagcctcttcgactgagtgaagacggaatccctgtccgccctttctcccgcatcccaattcggttaggatttcaatgatatccggccgacgggaggaagaagcatggcaaaaatcgtgaaatctccgatcagactggcgatgctggtcatccttccagccctctccgcctgcaccgcggatgtcggtcccggctatgggccaggtccagcttacggaaccgggccggccccggtccgtccggctccgccgccgcgccctcgcccgccgcagccgcaaatgtgcacaatggaatacgcgccggtctgtggtgagcgcggtggccgcacgcagacattcggcaatgcctgccaggccaacaacagcggtttccggatcgttggccgaggcgagtgccgcgccggcccgccgatgacgccgggacccgggccgggccctcgcccgcgtccgccacgcgaggaaccgatgccgccccagcggcccggtggcatctgcacacgcgagtaccgccccgtttgcggcgagcgcggcagagagatcaggacattttcgaattcatgcgaggcgggcaatgccggcttccgcatcgtcggccagggcgaatgccgccgctgatggcgggaccttggcggacgtcgggtttccggcccgcgaatggggccggaaatgactgggggctcagttcgcgcccttgaccacctggccgttgaccgtgatcgaaccgtcgcgagcaacgctgacgtcccaacgctgacggccgtcgggatcggtcttgccgaagcccttgaccatcatcaggccgaacgacacctggttgagctcgggattgctcttggccagttcctggatggcggtgatcgtcttgtcgaagtcgcgtgcgaggatcgatgcggtcatcgaatattccgtggtcgacttcggaacgccgcgaacctcacctgagatttcggcatcatagacgctggaacgcgccgaaatcttcgggaaggcaacgaccatctcgccattggtcatgagctttgcgaaagccttgtcgctttcctcgctgctcttcttctcgtcggtatagtcgaccttcatcagctcttcgccgagtgcggcgacgttgagctcggggaagccgaactggagctccagctcctcgggaacgaagggcgcgtacatctcgggcagcaacgcggtgtcaagactgatccgctttgccgccatgccgacatcgaaccgcatcgcgtcgctcggaccgctcacgccgatcgtataatcgatgctgtcggcgccgccgctgccggctacgctcgatacgctcaccttgttcagcgttatcgtctcgttcaggctcgtcagcagcgggaacgacttgcgcagcagctccttgatcttctcactgtcggcgcgcttgagcttcttgtcgtcggcgtgctcgatgacgaaggcgaggatctcgcggaaatcgttgatggaaacgccattcaccgcggcggcgaaatccaccgagtcggcgcggatctcgacggccggtacttccttgccgctgatcgtctcgacgaaggcgttcatcgtgccgctgccggcgaaattggtccgccccttcaactcggcatcagacgaggtcatcttgtaggtcgaggggccggtctcgacgctcacctcttccttctccgtcttcgacgagaagcgaagcgccttgctggagaagtcgccagacttgagatagctgatcgccggatcgaagacgccgttggaaatcagggaatcgatgacataggtgaactcggtgttcggctggccgggtgccttgaacgcgccggtgacgtcgagcgagttgttgccctcgatcgtccacaggccgctttcttcaggcgttgcgaagatcgaccatgggttcaggcccttgatggaaaagttcttcggatcggccttcttcaggagcgccgcgaagtcatagatgatctcgtagcgcgtgcccgccgggttgacggtcacgaagcccttggccgcgtccttcggcagaagccgcgacaggttcgcctcgatttccttggcgccctgctggttgatatcgaccgcctgggccgtcgagatcaagccgagaagaacgacagcggtcgccgttagggtcttgagttgcatgctgaatttctcccgtaccatttgaggtcgcatgtgaaggctcgggccccgccctgtcaacccggcagttgcatgcgcgatttcaggcggcgatcctgcgcgagcgcatcggcatcggccggccgagaagatagccctgcgcctcgtcgcagccttcgtcgagcagtatgcccagctggacatccgtctcgacgccctcggcaagcaccggaatgctgaggctttgcccgagcgccaggatcgcgcggatgatcgcctttgcctgctcgctggtctcgacctcgttcatgaaactgcggtcgagcttgatcttgtcgaacgggaaggagcgcagcgtctccagcgacgaatagcccgtgccgaaatcgtcgatggcgatggatacgccgaggttcttcacctggcgcagcgtcagcagcgcccggtccttgtcgacgatgatcgacgattcggtgatctcgagctcaaggcgccatggctcgagcccggtctcgaacaggaccgaatgcacgagatgcgcgatatcctggtggccgatctggactggcgacaggttgacggcgatcttgtgcttctcggcccatccggcggcctccttgcaggcctctcgcagcacccactcgccgatcggcacgatcgcgccgcattcctcggcgaccgagatgaagtcgcccggcggcacgttcccgcgtgtcggatgttcccagcgcagcagaacttcgtagccggttatgtcaccggtcgagaccgatttctgcacctgatagtgcagatgcaattcgtttcgatcgatggccgaccacagatcgctcgccatcttgcggcggtcgcgcgccgcctcgtccatggccacttcatagaagcagatgcgctcgctgagcgtcgccttggcgcggtacatggccagatcggcattggccagcagcatctcgccggtcgatccgtcctgcggatagatggcgacgccgatgctggcgtcgggattgatgtcgaagccgtcgatcttgaagtcatccgtcaggctcgcctcgagccgcgccacgaaatcatgcaggtccgcgatgtcggagaactgcttgatcgccgcgaactcgtcaccgccgaagcgggcgacgaactcgtcttcgccgagatgccggctcatccgctccgacagggtgaccagcacctgatcgccggcgctgtggccgcgctgatcgttgatctccttgaacttgtcgagatcgatgccgatgaccgcgacctgcattcccgcgcgcttggcgaccgccaggtcctgcgacaggcgctcggaaaacgccgagcggttgggcaatcccgtcagcgcgtcgtggcgcgccatgaacgcgatcttttcttccgaaagcagtcgctccgtgatgtcctcgtaggtcgcgacccagccgccatcgggaagctcgttgaggttcaactggatcgaccggccatgcgcgatcttgtgaatgatcgagtgttcacccagcctgaacgcgcgcttcagcttgtcgtaatgctcggacgagcgcgtcgccacgacctcgggatcggacaagtggatctcgtatccgagcgcgatgatctgcctgtagctcatgccgggacggatcgttcccggctggaattcgaagatctcgctatagcggcggtttgcgagaacgaggcgttcctcggcgtcgaacaggcagatgccctgggagacgttctcaagcgcgaggtcgagattgcgcgagacttgcttgatgcggtcgcggtcggccttctgctcggtcacgtccctggtgatcttcgcgtagccggcgatctcgccgtcggcggcccagatgggatcgatcacgacgtgagcccagaacgaggttccatccttgcggaaacgccagccctccgcctcgaatttgccctccgtacgcgccttcagcagggcacgctgcggcaggccggcggcgcgctcctcctcggagtagaatcgtccgaaatcctcgccgatgatttcatcggcggtgtatcccttcgcgcgctgcgcgccgacgttccagttcgtgacgcggccgtctctgtcgagcatgtagatcgcgtaatcggtcacgccctgcacgagcatctcgaagcgcgcctcgctctccttggtcgagctttccgcccgcatcgcgaacagagccgcggcgaagccggacgcgatcatcgacagcgacacggacagaagagtgacgaccatgaagcccgtcgacatggtttcgctcggatcgaccgtcgggccgggaccgggtacgatcgtcagcgccgccatggcggtaaaatgcatggcgacgatcgctgcgcagacggtggcggccggcacgagcagcttgcggcccgcggccttgatatcgggaagtagatagaatccgatagccgaaatgacgacggcaagggtcatcgaggcgatgacgaacgaccggtcccatgtcatgctgccggcaaaccgcatcgccgccatgccgaggaagtgcatcgacgtgacgccgatgccgaacagcaccccggcgaacgccctgcgccccctgctctcggccccggccgcgaaggtcacggccgcaagcgtggcaaccagcaccagcgccagcgacgtcaatgttccggatgtatcgtaagtgacgaccacgccgccgctataggcgagcatcgccacgaaatgcgtcgcccagatcccgaaaccgccggcggcgccacccatcaacagccagatcaggcgcgccaccttgacggtgtttcgcgcccgctgcagcagcgtcagcgcggcaaggctggacaggaagcaaaggcacgcggccagcacgaccagcctgagatcgtgcatttgggcaatgcagttaaaaacggtaaacatgacttatccggaccaatttgccgttccgctttcatacgcggcggcttaagaaagcgataatgacgacggtccgcgcggtcctgacgatggctaatcgcgactgttattaatgccgcgtcaacggtgggtgatcctgggtttcgatttgctttcgcggcgaatgcccaagttgcatcagcttatgctaaaagactcacgcaaaaagacagggcggtcttgcctgcgtctatgccccgccggacgacgacccttgccattccaccgcaactagactatagcgcacgcgtccgcacagacacccttggaggcaatgcggatgaggatggggaaacccgcctccagttcagcgacaggcgatgcctgcgccgagctctccaaataacctcggaaggaaaagtcatgagccacgaaagctacgagctcaaggccgaggcgcgcgaacgggttggtaaggggtccgcccgtgaacttcgccgcaatggtctcatcccggctgtcatctatggtgacaagcaggccccaatttcgatctccctcagcaccaatgaggtaacgaagcgcatccacgctggcggtttcatgaccaccatcgcaacgatcgacgtcgacggcaagaagtacaaggttctgccgaaggactaccagctcgatccggtccgcgacttcacgatgcacgtggacttcctgcgcgtatccggcaacactcaggtctccgtccagatcccggttcacttcatcaacgaagagaagtcccagggcctcaaggtcggcggcgttctgaacatcgttcgtcacgaagtcgaagttcattgcccggccgatgcgatcccggaattcttcaacgttgacctcagcggcaagaagatcggcgacagcatccacatctccgaagtcaccctgccgaagggcgtgaccacggttatcgaccgcgacttcacgatcgccacgatcgttgctccggcagcaggcgtatcggaagacgaagaagaagctggcgaagctgaagcttgatcctttgatcgcttgaacgctttgtaaagtataagacccgctttctccggaaagcgggtcttttcatttccgccggccgaagcatttcaacttcgattaagacatttcgtggaagcatgccccatcgtttcagaacaggttccgttccgagcgaagacattgcgcggcaaggggcaaacgcaggaaaatgcataattccgtccagaacagatttctaggaattgtgttcgccgcgcttcttctgctcgtaaccccgctcttcgttctcttccttttcctctcctcggaacgcgccgaaaaggaaatccgcgacggcatctccgttcttctcgtcgccaacgcgcaggcgcttgcaaagccgctctgggatctggacgaagacagcgtcacgcagatcagcgccgccgtcgtctcgcagggcagcatcgtcaaggttcaggtccgcgacggctcgggccagctcgacgtcagccagtcgaccatcccggcatcctaccggggcggactggtcgaggtatcgcgcgccatcacctacaccacgctggacggcccgaagaagctcgggaccatctcggtcttctatcccgcgccggacctgttttccggcctgaggaacgaagagatcatcttcctgtcgatctttgttttcgccgttctcattgtcttttgcgccgggctcatcggcaaccgcatcgtccttatcagaccgttgatgcgcctgatcgcggccatcgaggccaccggccagctcggttctcgccatcatgtcgactggcgctccaacgacgaaatgggccgcctggcccgcagcttcaacaccatgcagtccaagctggaaagcgaggagcaggaactgaaactcgcgcatcgccgcgcgatcgacatctacaatctgacgccggccatgctgttctccctcgacgaggacgaccgcatcaccgccgtcagcgactactggctcgccgccaccggctacaagcgcgaggacatcgtcggcaatcgcttcgccgatctcgtaacgaccgacacgcgcggcgcgttcctcgagcgcaaggacgacctgaacggcggcgtgaccgtcgatgtcaccgtcaagttcctgtgtgccgacggttgcgtcatggacgtgctgatcctggaatcgaaggccgcgaccggcggccaggacttcctttcgctttccgtcatgaccgatgtcacggcgctgaaggcctcggaagcccgcaaccacaagcaggcgatcaccgaccacctgaccggacttctcaatcgccagggcttcgagaccgtgctcgacggcaagatccgcgaggccgacgccgccaaacaggagctcgcctgcctgttcgtcgatctcgaccgcttcaaatggatcaacgacaatctcggccacgccgagggcgacaaggcgctgcgcgagttcgtcggccgcctgaagagcaagctcgcgccatcggacgtggcagcccgcctcggcggtgacgagttcgcgatcctgctgccatcgcaagacgccgcccggcgcgccgatctgatggccgagatgctcgccgcgatcttcgacgagcctttcggtaccgacatgcatctgagcgccagcgtcggcatcgccatctatccgcgccacgccgacaatgccgccgagctgctgcagaaatccgacatggcgatgtatgccaagaagcgcgacggcaagaacggcgcccagcatttcgacaacgaaatggtcgaccatgcccgcgcccgcgccgagatcgaaagctgcatcgagatcggcctgatcgaggactggttcgaggcctacctccagccgatcgtcaatctcaacggccggggcgtcgccggcttcgaggcgctgatgcgcctcaatcatcccgtcaagggcctgatggcgccggccggcgtcatcaacgtcgccgaggagacgggcaagatcatccgcgtcggcaacgtcatcatggaaaaggcgatcgagcatctggcggcgctttcggcgcttcccggtctggaaagcagctacctcgccatcaacttctcgccgctgcagttcgagccggcgctgcccgcgcggctggcatcgctgctgatgcgccacaatatccgccccgagcggatcgtcgtcgagatcaccgaggctgtcttgatgcacaacaaccccgaaatccgcaagatcgtcagcgatatccgccagttcggctgccgcatcgcgctcgacgacttcggcaccggctactcctcgctcagctatctcaatcgcttccctgtcgacatcatcaagatcgaccagtccttcacccgctcgatcaacgacgccaacgaggatataaggcgcaagagccgcacgctcgtcgagagcatcacgacgctctcgcacaagatgggctgtaacgtgatcgccgaaggtatcgagaccgagcaggagtgccatacgctgtgcgagatgggcctcgactacggacagggctatctcttccaccggccgcagaccgtcgatcagctgatgatccggctggcggatgctcaaacgctcgcccgcgcctcctagacgcaagagagaagccgagatgataaaaccgctgctgcttctcgctctcctgagcttgcccttcgccggcccggcaagtggcgccaccgtcaatttcgtgaccgaggaatacccgcccttcagctaccacgaaggcaaggacctgaaaggcgcggccatcgagcaggtgcggatgttgatgcagaaggccgggatcgatatgagcgtcgagatcatgccctggagccgcgcctacgccgccacccaggccacctcgatgacctgcctcttcacgaccgcgcacagccccgagcgcgaccagctgttcaagtgggtcgagccgctgcttgtggacgacaacatccttgtggcgacggcttcgtcgggcatccccgaaaccgatccggacagcacccggcgttacgtcgtgggcacgcatcgcggcgactacaccgagaaactgctgaaggaaaaggggttcaccaggatcgatgtcgccagcgatttcccgtcgacgctgcgcaagctgctgagcggccgcatcgacctcatgcccatctcgtcgatctatttcgagaaactcaagctcgaacaccccctggtgcgtatcgcgacgctctcttcccaatcgctcgggatagcctgcgagaagagcttccccgaggatttgcgggccaggatgcagcaggcgctcgacgaactgatcgccgacggcacccagcgggcgatcttcgagaaatacggcctgcgcccgcgcccctgatcgcgcgctccaaatcttgctggcccaatctcgcgcgcccgatctagcttgattgattctggccctcatcggcacgcgcgcgcttgacttcggcgccgtttcgcggtggtgaacgtgctcgggaaatcgaaacgctcaggaatgaacgcgccatgcttgttatcgccggcctcggcaatcccggcagacaatatgccggcaaccgccacaacatcggcttcatggccgtggacgccatccaccgccgccactcgttttcgccctggtcgaagaagttcaaggccgagatatccgaaggcgagatcgcgggcgaaaaggtgctgctgatcaagccgcagacctacatgaacctgtcgggcgaatccgtcggcgaggccatgcgcttctacaagctgcaggcgtccgacatcgtcgccatctacgacgaactcgacctttcgcccgccaaggcccgcatcaaggttggcggcggccatggcggccacaacggcgtgaagtcgctcgacgcccattgcggcaaggactaccggcgcctgcgcctcggcatcggccatcccggcaacaaggatctggtacacaactacgtgctcggcgatttcgccaaggtcgaccagacctggctggaaccgatgctcgacgcgctcgccgacaatctcgacatgctggtcaggcgcgaggattcgcagctgatgaacaagctggcgctcgccgtcggtggcaaggaagacgaggacaagccgaagcccgccaagccgtcgggtgcgaacgcggccggtcagcagcctgccggacagaaatccgatggccagaagcccgccggcaagtcgcacatccaccaggcccgcaacagcgcccagccgaagaagctgccgacgacgggaccgatggccgagatgctgaagaagatgttcggcaagaaggaagactgagaagcgccctcgcctcttgcgatccgcaccgctgagcctattcctcgggctcggttgtgaacatcagcgggaaccccgcttccttgccgaaatccatggcctccttcgccttggtctcggcgatatccttggcgcagacgaccacgacggcggtgccgagcttgtgcgcggtcatcatcacccggtatccggcttcctcgctcatcctgaagacgatcttcagcaccgccgtcacgaattcgcgcggcgtgaagtcgtcgttgacgagaatgaccttgtaaagcttcggccgatcgagtttcggcttggccttcactttcggtgtcagggcgacgtcgttgtcactcatcgggcagtccatccgttgatgacaggaaaggggcgagcctgtgctcagcccgcttaatatattgcactgcaagcgccgctttcaagccaaagccgctttgatcacgcaagatcgctcgaaaagcttgacccggaggcggcttttaccccatacgcacggccaaggaattcaagaacagcaggtttcagccatgggcttcaaatgcggtatcgtcggtctgccgaatgtcggcaagtcgaccctcttcaacgcactcaccaagacggcggcggcgcaggcggcgaactatcccttctgcacgatcgagccgaacaccggcgaagtcgccgttcccgatccgcgcatgcagaagctggcgggcatcgccggctcgaaggaaatcatcccgacgcgcatctccttcgtcgacatcgccggcctcgtgcgcggcgcctccaagggtgaaggcctcggcaacaagttcctcgccaacatccgcgaagtcgacgccgtggtccacgtgctgcgctgcttcgaggatgacgacatcacccacgtcgaaggccgcatcaacccggtcggcgacgccgacacgatcgagaccgagctgatgctcgccgacctcgaaagcctggagcgccgcgtcgagcagacccgcaagcgcgccaccagcaaggacaaggaatcgctggctcagctcccggtcatggaagcggtcatcaagctcctcaacgaaggcaagcccgcccgtcttctcctgaagacgctggcgcccgaggagatcgagatcctcaagggcctcaacctcttgacctcgcacccggtcctctacgtctgcaacgtcgccgagggcgacgccgtcgacggcaacgagcacaccagggcggttgccgaaatggccgagaagcagggcgcggaatgcgtcatcatctcggcggcgatcgaagccgaagtggcgcagctgccggaagaggaagcaaccgagttcctctcggcgctcggtctgtctgaagcaggcctcgaccgtctgatccgcgccggctaccacctgctcgacctgatcacctacttcacggtcggccccaaggaaacccgcgcctggaccatccgccgcggcaccaaggccccgcaggcggcaggcgtcatccacaccgatttcgagcgcggcttcatccgcgccttcaccatcggctacgacgactacatcaacttcaagggtgaagtcggcgccaaggaagccggcaaggggcgcgacgaaggcaaggaatacgtcgtccaggacggcgacgtcatccacttccgcttcaacacctgatttcgagacgagaagattgccgcctggagcgtgtctcgcaagactgttcagcggtcttgcgcgacatgcgacagaacaaagacttgaagcgtgatgaacgaatccgaaggatcgcggcacgctttaggccggcggcagtctttttcgaatgccatcaggcagacggcgcacgacggaacgccgaagcggcatccaccccgtgccgatgacaagaacgatcacgcccaccgcgagcagcgtgatgaagatgtaggtatcgacctgcgcattgccctggcggaagatcccgtagagcgcggcgcccagcgataccagccccgacgtcacgaaggcgcgtcggtcgatgatcagccccaccagcatcagcgccatcacggtaacgaccaccacgggcgtgcgcatcgacaccgtgtcgaggccgccgagcgcccctcctccgccgcccgacagccacaggatgctgtataaaagcgccggcgcggcgccgagatgcagccagaaggcaatgtcggaattgaccgtgcggcgcagcgggtccatcagatcgaagcgcatcgccagcgcgaacagcccgaccgcgcagacgaccgccagcaccgacaggacgccgccatgggtgacggcgaagagcggatcgccgctcagccagccgagcaggcgcaggacgagctgcagcgccacgaccaccgcccccatgatcgccagcgcgaaggcaagcggtatccggtagagcagatagaaaagccccagcacgacggggaaggccagcgtgtattgcagcccctcgttgttgtcgccgagcccgacgatctgatgcgatccctgcagcagcagggccgagacggacgctgtccagaaggccagcgcgatggtcagcgccaccgccggcaacgccagccgctggcggcgcacgaggatttccgcgagcacgatgatggccggcaggaccgcgtagatggagccgacgccccagagccccgcaagcgccaccacgataccgatggtgatcagcacgtcgtgaaagccgcgcacgaagctcggcgtctccgtatccgaaaatgccgcccctcccgttgcccggtcccgtaccgccgacaccgtggcatccgcgcgcacgccgcgggcgacgagaaacgacaacaggcgctcggacgcctgcgacgggatgatcccctcgcgctcggcctcgtcaaggatcgacttcagttcggacatgcggaattctcgctggaatcgttgagtgacgccgcatgctattgtaatcatgacgaaacgcctatgacgtggagacgaatttgtccgatcagatactggcctacgaggattttcaacccggtcgccgcttcccgcttggaccgacagccgtctccgccgaggaaatcgtcgaattcgcccgcgagttcgacccgcagccgatgcatacggacgaagcggccgggcgcgcgagcattctcggcgggctcgccgcatccggctggcacacatcggcgatgctgatgcggatgatgatcgacagctacctgctgcattcgctgtcggaaggctcgccgggcatcgacatcatggaatggcgcagacccgtcatcgccggcgacacgctcgccggccactccaccgtgctcgaggcgcgcgcgttgcgctcgcgtcccgggatcggcatcgtcaagttccgccacgagttggaaaaccagcgcggcgaactggtatgcctgtcggaaaacgcgatcatgttccgcatggccgccccggcgcagacaggcacgggagcaagcgcatgaggatgctggatcgctacgcgctcggtgaaaggaccgagacgggaagctacgccttcaccgaggaaaacatcatccgcttcgcgacgcgctacgatccgcagcgcttccatgtggacaggcaagccgcgcgcgaaagcctgttcggcgacctttgcgcctcgggctggcatacatgcgccggctggatgacgaccttcgtcgcctattggatcgccgaaagcaggaaactggcgagcgaaggccacacgccgcccaagctcggcccggccgccggcttcaaggacctgcaatggatacgcccggtcttcgcgggcgaaaccgtcgattacgccgtcaccctgctgtcgagccggccactggcctcgcgcccgggacgcatcctcaacaccatcctctgcgagggccatgtcgcgggcgtcccggttgtcaggttcgaaagcagcgtgctggaattcgaatagggcgtcggatcgcgctctagaccagagcctttcgtggaggcccgctcagtgacccggaaattcgaccagcgtgcgcacgtcgacgccgagcgcttccagtttcgcccgcccgccgagatccggcaggtcgatgacgaagcaggccgacaccacctcggcgcccatctggcgcagaagctgggtggcgccgacggcggttccgcccgtggcgatcagatcgtcgacgaggatcaccttctcgcccggcttcaccgcatcgacatgcatttccatttcgtcaacgccgtattccaggctgtaggcgatgcgcacggtctcatgcggcagcttgcccttcttgcggatcggcacgaaacccgccgaaagctgatgcgccacggcgccgccgagaatgaagccacgcgcctccatgccggcgatcttgtcgatcttcgtcccggcataaggctgcaccagctcgtccaccgcgcgccggaaagcccgcgcattgccgagcagcgtggtgatgtcgcggaagatgatgccgggcttcgggtagtcccggatggagcggatggcggcggcgagctccgaggtcgtgtcggtcatggaatgtccagtgtgtaggcatgaaatcggctgcaccctatcaactgcatccacgggaaccaacaaaaaaggcgccccggggagcgcctttccaatcaagcctttgcgataccctactgctccttgcgggcgtagaccgaccgcttggtgaggtagattaggacggtgaagatcaagaggaacaccatgaccatgaaaccggtctgcttgcgatcgaccagatgcggctcggcggcccacatcaggaacgaggcaacgtccttggcgtactgatcgaccgtccccggagtgccatcgtcataggtcacctgcccgtcggacagcggcggcggcatggccagaaccgaggcggcattgaaatagggattgtagtgctggccctgcgacaccgtcgtcccggccggcgggttctcgtagcccgtcagcagcgagtagatgtaatccggcccgccttcctggtactgcgtgaagatgtcgaagatgaacttcgggaagccgcgttcgatctcacgggccttggcgatcagcgagaagtcaggcggcgccgcaccgttgttggaggccgctgccgcttccgcattggggaacggcgacgggaagtagtcggatggcacggccttgcgcgtatacatgtcgcccgccgcgttcggtccgtcctggacttcgtagttggcggcgaacgccttgacctgcgcgtccgaatagccgaggtcgccgagcatgcggaacggcaccagctttatcgagtggcaggccgcgcagacctcgctgtagaccttcaggccgcgctgcaactggcccttgtcgtaatagccgagaggcccggcgaaggtccaatcgacctccttgggctccttcatcggatagtgcggggcggccgcggtctcctgctgtgcgccgggctttgggtcctgtgcgagcgccgcggtcccgagacagccggcgaatgccagtgacagtatgcttgcaacaagctttttcatgatgtgtgttccctctcgccgcccgctcatgccttggccgcttgggcagcgactgacttgttgcgtttctccagcaccgcctcggtgatcgagttcggcagccggcgcggtgtctcgacgagacccaggacaggcatgacgatcaggaagaaggcgaagtagagcagcgtgctgatctgcgagatcgtggtgtagaggccttccgccggttgcgaaccgagccagccgaggatgatcgcgttgatcacgaacagccagtaggccatcttgtaccacggacgatagacggccgagcggaccttcgacgtgtcgagccatggcaggaagaaaaggacgatgatcgcgccgaacatgacgagcacgccgcccagcttggaatcgatcgggccgatgttgaaggtgatcgagcgcagcatcgcgtagaacggcaggaagtaccattccggcacgatatgcgccggcgtcttcagcggatcagccggaatgtagttgtcggcgtggccgagatagttcggcaggtagaagacgaaataggcgtagaccaggaggaagaccgaaacgccgagcgcgtccttgagcgtggcgtacggcgtgaaccgcacggtgtcggtcttggtcttgatttcgacgccggtcgggtttgtctggccggtgacgtgcagcgcccagatgtgcagcacgaccacgccggcaatgacgaacggcagcaggtagtgcagcgagaagaagcggttcagcgtcggattgtcgaccgcgaagccgccgagcaggaactgctgcacccattcgccgatcagcgggaatgccgagaagaagccggtgatgacggtggcgccccagaaggacatctggccccagggcagcacgtagcccatgaagccggtcgccatcatcaggagatagatgaggacgccgagaatccagaggatttcgcgcggcgccttgtacgagccatagtagaggccacgcgcgatgtgcagatagaccgcgacgaagaagaacgacgcgccgttggcgtgcatgtagcgcagcagccagccatagttgacgtcgcgcatgatcttttcgacggaattgaaggcaaccgacgtttccgccgcgtagtgcatggcgagcacgacaccggtcatgatctgcacgacgagcatgaccgagagcattgcgccgaaggtgtaggcgtagttcaggttgcgcggaaccggataggcgacgaagctgtcatagacgagacgaggcagcggcaggcgcgcatcgatccacttctcaaggccggttgatggctcgtagctggattggccactcataaatcagtccccctcaaccgattttgataactttgtcggaaacgaacgaaaaggtcggaatcgcgagattctgcggcgccgggcctttgcgtatgcggccggccgtatcgtagaccgagccatgacagggacagaaccacccgttgtattcgccggcctggccgagcggaacgcaaccgagatgggtgcaggacccgatcatgacgatccagttctccttgtccttgccggccgaacggtcgacacccgtcgcctgcgcgtcggcggcgaggttggcgttgcgcgcgaccggatccttgagatccgccattggaacatcattcgcagccttcacttcctcaggtgtacggttgcggatgaagatcggcttgccgcgccacttggcggtgagcgacatgccaggctcgaggctcgatacgtcgacttcgatcgaagcgagcgcgagcgtcgaggcatcgggacgcatctggtcgataaacggccatgcgacagagacggcgccgacggcgcctgccatacccgtggttaaataaaggaaatctcggcgtgtgggctcgctagagaccccgcctgtcgtttcgtgttcgctcacggcttaacatcctctgcccaaatttcgcggaattttccacgccatccctccaaggcgacgaatctgtcttacatatattcgaacttagattccccacccactaagccgcgttctattattgatcatcaattatgtccagccttggcaaggcaagatggcacaatgtcgcggcccttgagagttgattctttaggacaatcgcgccgccgcaacagtgttgcattgcaacatatcaagctgcgtgttaggtggccggacgaatactcgctcacgcccggtaccagccaatgagacacactttattctgcgtgggaagtgttctagtctcgctgttacttgccgccatttctttacgttacgtcacgcacacttggctgcttgccttcgtctacagctttcaggtccacttcgcgctcgccggcctcgccgcgagcctcgtcctgatcctcatcaagcgccactggtacgcctatcttctggtcaccgtttcattggtgctcgccgcccatggcatactgatgatgaaggaattcgaggccgccccggcgaccgccgcatcgcgcccgctgctgcgcctgatgtccttcaacatcgagaacgacaatatcgaaaacagcggccgcatcgccgagaccgtgatcgcctccggcgccgatctcgtcacaatactggaggccgcgccgctgcttcgggaactctcgcgcatctcggcgacctacccctaccgcatcggctgcggcgtcggcacgcctggctgcgatacgctggtactctccaagcggccctttatcgatcaggcggtcagcacattgggcgatctgtggccaaaccgtctcgtccaggtaacgatcgatgtcgacggcacgcctgttcacctcgcctcggtccacctcgccaaaccctatttcgacgatttccaggtcggcgaactctgggatctgcgcaacgccgtgaagtcggtggacgggccgctcatcgtcgccggagatttcaactcggccatcatcgcgccgcgcatccaggatttcgtccgcgccaccggcctgaacgcggcgtttccgcaaccctccacatggccggtcagggccggcaagctcggcatcgccatcgaccacgtgctggcccgcccgccgctgcgtctgatgtcggtcagccaggtcgcggacaatgtcggttcgaaccactacggcctgatcgccgagatcgccatcgatcgctgacgacaggcagccgaccgcgaatgatcctcgccgcctaaacctcttccagatcggccgccaggaagccgccagattgccgtgcccacagttcggcatagagcccgccatcgcgcagcagcgcctcgtgcgtcccctcctggatgatgcgtcccctgtcgacgacgatcagccggtcgagcgccgcgatcgtcgacagccggtgcgcgatcgccaggaccgtcttgccgtccatgatccggttgaggttggtctggatcgcctcctcgacctcggaatccagcgccgacgtcgcctcgtcgagcaccaggatcggcgcatccttgagcatcacccgggcgatggcgatccgctgtcgctgcccgcccgaaagcttgacgccgcgttcgccgacatgcgcgtcgaaccccttgcgcccctgctggtcctccagccgctggatgaagcccagcgcctcggcgcgccgcgccgcctcgatcaaccccgcctcgccggcatccggccggccgaagaggatgttgtcgcgcaccgagcggtgcagcagggaggtgtcctggctgacgacgccgatctgcatcctgagcgactcctgccggacattggcgatgtcctgcccgtcgatcaggatgcggccaccctcgaggtcgtagagccggagcagaaggtttaccagcgtcgacttgccggcgcctgagcgtccgacgatgccgaccttctcgccgggtgcgatggtgagcgagaaacggtcgatcacgccgcttccctttccatagtggaaggacacgtcgtcgaaacggatgccgggctcggcgatgacgagatccggcgcatccggtttgtcgacgagggcgagcggcttggagatgagttccgccgaattctggatggtgccgagattgcgcatgatgccgttgaactgcgtcatcaggcgtccgagcaggaaattcagcctgagcaccagcgccagcgagaacgcgacggcgcccgagctgatcagcccctgtagccagagatgcacgctgaggcccgccatcgtcacgatcatgatgcccgaaagcagtgccatggaggcgcgcacgccggtgatgaagcgggtgaagagcagcaccgtcgcctggaacgtgtcgaagccctgccgcatgtagcgatcggtctcctcgtccctggcaaacagcttcagcgtctggatgttgctgtaggcatccaccatgcgaccgttgagcatcgaggcggattcggcggtatcgcgcgagtggcggcggatgcgcggcacgaagtagcgcgcgagaatgccgaaagcgacgagccagctgagcaccacgatcgccagcgacagatcgagacgcgcgacgagaaccagcgtcgtcgccgcatagatgccgacgaaccagacgctctccatcagcgaggtcacgagatcgcccgtcgcctgccccgccgaccacaccttggtgacgatccgcccggagaaatcgctctggaagaacgacagcgattgccgcgacacatgcagataggattgccagcgcgccagattgtaaaagccgggcgtgatcacctgctggtcgaccagcgcgatcaacagctgcacgacgaagcgcacgaggccgatgaggaagagcatgccgaacagctcgaagccgtaggtcgccaggagcccgttccagccgacctcaggcgtgatgctggcgagaatgtcgaccacccggccgacgaaccagaacagcgccgcctcgatcgcggccgacatcccgccgagaaccagcatggcgatgaagggcagtttcgcctggccgatgtagaaccagacgaagccgctcgtcgaccgcggcggctggatgttgtcgcgcggttggaaggggtcgatccaggtctcaaaggcacgaaagagtcgatttaggagcatatttgcgatataggcttatccgccggatggggaaagcaatccgctcgccggaccaaccttatattttcgtaatgattggtaacatcgacggcatcgtcgttgaatgagacatgtcccgccacaatgtgggaatagcatgagatttcacgggagacggccacaatgcaaaagaggacactcgtgtcgagcataccgttgcctttggcggaaagactcgatgcggtcacggagcagctaggcgtaccgcacgaccaggtcgtggcggaagccgtagccgcatggatcgatacggaagagcagcgtcggctcatggcgttgcgcacgctggccttcgccagcagcatggcggtcgaaggccatcgcgtcatcgactgggcggacagcctgagtgccgacaggcactgaacagacacagccaagcgactgattggaaacaacaacgccctcccgatatcccagggagggcgttttcaattgatggcgggcgtggtcactcggcggccgcttccgcctcctccgagtgatcggcgaggaagccgcccgactggcggttccagagatcggcatagacgccgccctgccccaccagctcgttgtgcgagccggcctcgatgatcttgcccttgtcgagcacgaccagccggtccatctccgtcagcgtcgacagccggtgggcgatggcgatgacggtcttgccctccatcagcgcgaacaggttctcctggatcgcggcctcgacctcggaatcgagcgccgaggtcgcctcgtcgagaaccaggatcggcgcgtccttcaggaacacgcgggcgatcgcgatacgctggcgctggccgccggagagcttcacgccgcgctcgccgacctgcgcgtcgagcgccttgcgcccctgcatgtcgacgagaccctcgatgaagtcccaggcgttcgcccgcctggccgcctcgatcacctccgcatccgtcgcatccggacggccgtaggcgatgttgtcgcggatcgagcggtgcagcagcgacgtgtcctgcgtgacgacaccgatcagttcgcgcaggctttcctgcgagacatgcgagatgtcctggccgtcgatggtgatgcggccgccttccagatcgtagaagcgcagaagcaggttcatcagcgtcgtcttgccggcgccggagcggccgaccaggcccaccttctcgcccgccttgatgtcgagcgtcaggttctcgatgatgcccttgcccttgccgtagtggaagccgatccggtcgtagtggatcgcacccttcttggccgatagcgacgaggcgcccggcttgtcggtgatgtcgtgctgcttcgccatcatctccatgccgtcgtagaccgtgccgatattctcgaacagcgccgagacttcccacatgatccactgcgacatgctgttgacgcgcatggcaaggccgatggcgatcgcgatcgcgccgaccgaaatgccgccgttcagccagaaccagatcgacaggcccgagatcacgaacaacgccacgcagttgttgaagtagaccagtgcgtggaacatcgtgaccttgcgcatctgctggtgcacggtctgcaggaactggtccatgccctccttggcgtaggtctcctcgcggccggcatgcgagaacagcttcaccgtcgcgatgttggtgtagctgtcgacgacgcggccggtcatcagcgaacgcgcgtccgcctgcatcgccgcgatcttgcgcagccgcggcacgaagtaggcgacgatggcgatgtagacgccgagccatgccaggatcgggatcatcagccgccagtcggccgccgcgatgacgatgatcatcgagatgaaatagctgacgacatagacgaagacgtcgaggatcttcatcaccgtctcgcgcacggcgagcgacgtctgcatcaccttggttgccacgcgtccggcgaactcgttggcgaagaaggtcatgctgtgacgcatcaggaaacggtgcatctgccagcgggcgatcatcgggtagttgcccatcagcacctggtgcatgatgacggaatcggccaccgccgccacgggcaggccgatcaggatcagcgcgcccatccagtagagcttgtagccctcggtatcgaggaaggtcttcggatcggcctgcgtcagccagtcgacgatgttgccgaggaaccggaacaaggcgacttcgccgaccgcgatcagcatcgtcagcaccgccatggcggcaagccagggcgccgccggcttcgtatagtgccagcaaaaggcaaagagccccttgggaggaacgccgggttcctcgtcggggaagggattgaggcgctgttcaaaccagccaaacatgaaaatgctccgaacttcagcgttccggccctggccggcgcggacgcgcaacggcttatatgggcagcggacgttcaagggacgaggccaatatggccgcgcaatggattaacgatgggaaatcagaaagaagaagacgcttaggagcgtcgggtcgccatgatccgcacgatgacggacgggaggctgacatacggcaatgcattcatcttggcgctcccttgttggcgattgaagatatgcaccgataacgcgaaatcggccggaattccagcccctacttgccgaatgtcgaagattcacgcccaaaaaccaggctgttgcaccaaaaccgcactcgcgctaggtcaggccgaacggaagcgatcaaacggcggcgatcatggcggacctcagaatagcactctatcagcccgatatagcaggcaataccggcaccatcctgcggctggccgcctgcctcggcttcgccgtcgacatcatcgagcccgccggtttcgacatctcagaccgcaatctcaagcgcgccggcatggattatatcgctgccgccgccctcacccgccatatcaatttcgagcggttcgaggactggcgcaaaaccaccggccgccgccttgtgctcgcctccaccaaggcctccggccgctacaccgacttccgcttccgccctgatgacatcctgctcttcggccgcgaaagcgccggcgttcccgatcatgtgcatgacaccgccgatgcccgcatcctcgtaccgatggtcgagggacagcgctcgatcaatgtcgccgtctcggcggcgatgatcacgggcgaagccatgcgccagaccgtctggtcctgatcccgccatcgaaatgccggttcggcggcggataatgtcgcgaacggcgttgtgaaatcgccgatcaggcgtataatttttagccgggcaaacaaaaaatcggacgatgtgccgatatttcaatgatttgccatcaggaaagagtcgcagaacgcgccacttaggacgccaagagatagaaaaagaccggcccgcatggaatccaccatcgtcatgatcaacctgttcggcgccgtggccttgctgctgttcggcctgtcgcaggtcaaggatggcgtcaaccgggccttcggcgcgcgactgcggaccgggcttgcatcaggcaccaagagcggcctgcgctccttcctctccggtttcctcgcaaccatcgccctgcaaagctccaccgcgaccgccctgatggtcgcctccttcgtcgagcgtgagctggtcaagccgcgcatggcgcagatcgtgcttctgggcgccaatgtcggcaccgccgtcaccgcctggatcgtcgcaaccggcatcgcctggctgtcgccgctggtcatcctcgcgggcatcgtgctctatcgcggcggctcgacctcccgccagggcggcggtcaggcgctgatcggcatcggcctcatgctgctgtcgctgcatctcctgagcagcgccacggagccgatgcgccagtcgccggcgctctcggccttcatcggcctgctcgacaatgcctggccggtggcgctcgccttctcggccgggatcgccttcatctcctcctccagcctcgccgccgtcgtcctgatcctgtcgctcgcctcgacgggcatcctgtcggcaggcctcgtgatcgtgctggtgctcggcgccaatctcggcggcgccatcccgccggtcatcgcctcgctttcaggccccgcctcggtcaagcgcgtcacgctcggcaacctgatcgtgcgcgccatcggctgcctgatcgcgctgccgctcgcgggcttcgccgccgagctcctggaaaccttgccgctgtctccggccaagctcccggtcgacgcccatctcggcttcaacctcctgctcgcggcgcttgcctggcccttctcgcgtctgctgtcgcgcctgatgctgaagatggtccccgaggacgagcaggcggacaacgccccgcgctatctcgatccgcaggaactctccacgcctgtcgtggcgctcgccagcgccacccgcgaagtgcttggcgtcggagacctgatcgagcgcatgctgcatcgcgccgccgatgccttcgaacgcaacaacatggcgaagctgacggagatcggagcgctggagaagcgtgtcgacagcctgcagcaggacgtgaagatctacctctccaagctcggccgcggcggcctcagcgaagaggacggacgccgctccatcgtcatcatcgactacgccatcaacctcgagcacatcggtgacatcatcgagaagggcctgctgccgcaggtcgccaagaaggtctcgctcggcctgaaattctccgaggacggctatgaggagctcagcaagctcttccacctgacgctggaaaacctgcgcatcgcccagacgatcttcgtcacccgcgatttcaatctcgcccggcagctgatggaagtgaaggtggaagtgcgccgcatggagaagcagtcctcggagcgccatctggaacgcctgcgcgacggccgcgccgacagcctgcagaccagttcgctgcatctcgacatgctgcgcgacctgaagcgcatcaacgcccacatcgtctccgtggcgcacccgatcctggatgaaagcggcctgttgattgaaagccgcctgcgcaacgccgccgaatagacgtcaatcggccgatggcaggcgccgcatggtgaactcgatctggtcgccgtcgagctgtcgccagctctcgacctcggtccagtaggcggccttggggtactcgtcgaaccactcgcgggccttggcgcgcgcatcgagcagcgccaggcaataggtctgccgcacgaaccggtcgttcttgcgcggcgtgccctcggcccggtgcgtggcaatccttcgcttcaaaccgtcaaatgacggcggtcctgggatcttcgtcatacaacctacctctaatggaaaggtagtatcgaagcctgaacattgcgagtcgaatctgaagcctgctcaccaacgcgctggcgcggttggcgctccgccggacgacctgctatcaggggcgattgaagcgggcacgactcgaaattggcccgcgcgcgtaccggagacgacgactatggaacgacccgaacttccgatcggcctgcccgcggatatcgaggacaagaaggagctggcccgcacctggttcgagggcctgcgcgaccagatctgcgcctctttcgaagcgttggaggatgaactcacaggaccgctttccgatcgtgaaccgggccgcttcgtcgccaaggactggcagcgcgagaacggtgcgggtggcggcggtcgcatgtcgatgatggaaggccgcgtcttcgagaaggtcggcgtccacacctccaccgtctatggcgagtttagcgccgacctgcgcgcccagatgccgggcgccaaggacgatccgcgtttctgggcctccggcatctcgctgatcgcccatccggtcaatcccaatgtccccgccgtgcacatgaacacccgcatggtggtgacctcgagccgctggttcggcggcggcgcggacctgacgccggtgctcgaccgccgtcgcacccaggaagacgacgacacaaggctgtttcacaaggcgatggagatcgcctgccgcagccacgccggcgtcgccgattacgacgcctacaagaagtggtgcgacgaatacttcttcctcaagcaccgcaacgaggcgcgcggcatcggcggcatcttctacgactggctgcattcggccgaggaagccggcggctggagcgccgacttcgccttcacccgcgatgtcggccgcgccttcgcgatggtttatccacggattgttcgctccaacttcaataaacagtggacagaacaagatcgtgaagaacaattgattcgccgtgggcgatatgtcgagttcaatctgctatatgaccggggaacgatcttcggtttgaaaacgggtgggaatgtcgagtccattctctcatcgctgccccccgccgttcgctggccgtaactgggaggaaagatcggcagcaagcttggtaaattgcacgtgagaggcttttaataagcggaccggatacccatttcatgcatgtacgcgcctaacaatcggaggaggattgtaatgacgatacagagtggaacaccggcggcgacaggtgtccaacagccaccccgcccaatcgatacgcccgagctgctcacaaggctggccgaggcgctgaaagccaagagcggctccgacctgcccctttcctgcttcgtggaacaggtaaagcttcaactcgccggcggcctttccgccgaggagctgtcgcgccgcgccaggagccagcacagcagcgcacgcacggattgctaccgtgcatgggcgatgcccgaataatcggcccgaataatcgggttgaggattcaggcccacacgcttttgatgatgtggcctgaacagtccggggaccggacacatcgatgatcgcgaaatggcgatccctacggccggtgcggcaaccggccggaaccttcctgtccctggagcattcccacagaacgcaagagcggaactcaagtcaggaggagacgatgagacttttcgaatgtggaacgctggtccccggatgcagctggcacacccgcgcaagcgacgacgccgaagtcgtgcgccgcgccgtcgatcatatgaagtccgcgcatggtgaaaccatcatccgcgaaaacatggtcgacaacatcaaggcccgcatccgcaacgaagcgaacgcggcctgatcttggcgatctgcctattttacgcgatctgaaagccgggcgagcaatgtcgcccggtcggaggcgaagttctcctccacccactgatgctccagagcggccagcgtctcaccgacctgccggccggcggctatccctgccgccatcacatccccgccattcaccggaaaactcggcttcacccaggcattggcatggtcgagcagcttgttcagccgcgctgatcgcgccatctccgccatgtcgccctcggccttgccgcgcgccaccgcgagcgccagccgcagccgcgtcgtgatgccctgcgaaccgttgcgataaagcaggcggtcgaaggccgcgacggacatctcgtcgttgatgggagccgcgttcgcccaggccttgagcaccgtggcttccgcattggcaagcttcagccgcgccgccatcgcctcgagccgtttggcgtcgggcggcacgatcgcggccaaccgcagcagcggatcgggcgtccagccgagcgccttctcggtggcgacaagcgccgggatcgcatcgatgccccacttctccgtttccggcaggatttccgtcagcgcgccgaccgtgcgcatccacaacagtgcccgccccggattttccgccgacaacagcttgcgcatctccgaccacacccgctctgccgacagcgtcgcgagcttggagcgcgccgccgccgccgcccgcaacccatccgcatccggccgtcccgaaccgtaataggcgaagaagcggaagaagcgcaggatgcgcagatagtcttccttgatcctggttgcggcatcgccgatgaagcggatgttgcgcttctcgatatcggcaagcccgccgacgagatcgaccacctcgccgctttcgccgacatagagcgcgttgatcgtcaggtcgcgccgctcggcatccgtctgccagtccttgctgaacgccaccgtcgcccgccgcccgtcggtctcgacatcggcgcgcagcgtcgtcacctcgaacggcttgcggtcgatcaccagcgtcaccgtgccatgctcgacgcccgtcggcaccgccttgatcccggctgccttggcgcgctcgatcaccacgtcgggcgtaagcgtcgtcgccacgtcgatatcgctgacaccgagccccatcaggctgttgcgcacggcgccacccaccacgcgcccctcgccgccatcggcattcagcagcgagaaaacgcgcttcagcgccgggtcgttgaaccatgcttcgtgagcaaggttggtcatgcgtagagcctttcatagagcgtgcggacgatcccggcggtgatgccccagatcatcctcgtttcatagggcatgcgatagaaatgtcggtcgagcccgtcgaccatccgcttgtcgcggatatggttgccgggcgccatcaggaaggagagcggcacctcgaacacgtcgtcgacctcgtcgggattgagcgtgagatcgaagcccgggcgcaccacggccagcacgggcgtgatgcgaaatcccgtcgaggccagatagttcggcagccgcccgacggtctcgacgaaggaacccttgagcccgatctcctcgtcggcctcgcgcaccgccgcctgctccggcgtctcgtcctcgccgtcgatcttgccgccgggaaaggcgatctggccggaatgcttgcgcagcgtcgaggtgcgctgtgtgaagatcacccgcgcctcgtcaccgtcgtcgatcacaggcaccaagacggccgcgtccctgagtttgaacgtttccaccttggcgacgatctcggggttcaggatatggtcgccatgctcgcgccacgacagatcgaccggcccgcccatctggtgcatcgcccggcgtctgaattcagcggcggagtaaagcgcgacctccctggtatggacctttgtcatcgcgacagcgcatccagttcggcggccggcatgacgggaaaggtctcgccgcccgatcgcaggcagaacatcgcgaccccgtcgacatcgatcgtctcgccgagttccacgagctggtacatcacggcccgcgacaccagcgcttccagccggccacgcacatgcaggtatggcttcaattcgttgttatcgccgtgaatgacgaaccggagcggatgctcgccgccagcctccacgacgtcgccgacattggtgcggaaggtcagcacggcctgcccgcccttcaccgaggcgttcatctcgacagccaggaacggcgcatcgacgatccggatgccgactttttccacaggagttacgaggtaggtcttgccgtcctcatccttgcgcagaaccgtggaaaacagccgcaccagcggcgcgcgaccgatcggcgttcccatgtagaaccacgtcccgtcggcgcggatttccatgtcgatatcgccgcagaagggcggattccatttctcgacgggcggaagaccgcgtttcgcgtcgccattatcacccgcggcgcgcgaaatcagcgcggccagatccgcggcatcggtcgctgccttgatctcttcggttgccattgttccgtctctgtttgcacttaacccaggaaatgtcacgagatagtcattcgaaacgaacttgtcagcccgcaacatcttcataactctatcgggtatgaggcacacgtgtaaaagtccgacgattcgcgacgaatgagatcagccgctggagagatgcctgatgggtatgatgaagaccgaagcccccctcgatgaaaaggcgatcgtcgccgcggcggaaaaagcgcttgccgatatcgccacggtcaggagcgaggtctccaaggtgatcttcggccaggagagcgtcgtcgagaacacgctgcttgccgtgctctcgggcggccacgccttgctcgtcggcgtccccggcctcgcaaagaccaagctggtcaccacgctcggcgaagtgctcggcctcggcgccaaccgcatccagttcacgcccgacctgatgccgtctgatatcctcggctcggaagtgatggaccaggacgagaccggccgccgctccttccgcttcgtcaagggccccgtcttcgcccagctcctgatggccgacgagatcaaccgcgcctcgccgcgcacccagtcggcgctgctgcaggcgatgcaggagtaccacatcaccgttgccggccagcgctacgatctgccgacgcccttccacgtgctcgccacccagaacccgctggagcaggaaggcacctatccgcttcccgaagcgcagctcgaccgcttcctgctgcaggtcgatgtcaactaccccgaactcgccgccgaacgacagatcctgctcgacacgacgggcctggccgaaaccaggccgcaggccgtgctgagcgccgagcggctgatcgagatccagacgctgatccgccagatgcccgtcagcgacaaggtggtcgatggaatcctggcgctcgtccgctccgcccgtcccggccagggcaacgccgccaccgacaagaacgtcgcctggggccccggcccgcgcgctggccaggcgatgatgctttgcgcccgcgcccgcgcgctctatgagggccgcctcgctccgtcgctcgacgatgtccacgcgctggccgagcccgtgctgcagcaccgcatggcgctgaccttcgccgcccgcgccgaaggcatgtcggtgcgtgacgtgatcgccgggctggtgaagcaggcccaaggctaggcagacaagggctgagcgaacaggatcaggccgacaaggatcaggccaacaaggatcaggaaggaagcctcacgcgtggcatcgatcggacagaccgtcactccgaccccaggcagcgatgcccttgcacgagcaaggcagcgcgccagcctgctgccggattgcctcgtcgaggccaagcggatcgccaacaccgtgatcgccggctggcacggccgccgcaagcgtgggatcggcgagaatttctggcagttccggccctatagcgaaggcgaaagcctggcgcgcatcgactggcgccgctcggctcgcgacgaccacacctatatccgcgaccgcgagtgggaagccgcccacacgatatggctctgggccgacatgtcgccgtcgatgatgtacaagtcgaccttcggcaacgcctccaaggaaagccgcgcgctggtcatcatgctggcgctcgccgaaatcctcgcccgctcgggcgagcgcgtcggctgccccggcgtcatggagccgatctccgcccgcaacgccgccgaacggctggcggtggccttgatgcacgcgccgctcaccggcggcctgccggataccgcgatgatccgcggctcgagcgacctcgtgctgatcggcgatttcctcgacgatgccggcgccgtgatggcccgcatcggcccgctcgcccggcgcggcctgcgcggccacgtcatcgaggtggccgatcccgccgaggagctgttcccctataccggccgcaccgagttcaccgaccccgagaccggctcgaagctcacctccggccgcgccgaaaatatccgcgaagcctatacgcgcgcctatctcggccgccgcgacggccttggccagagcctgcgccatctcggctggaccttcatcagccaccgcaccgatcacctcgcctccgaggcgctggtcgccgtccacatgcatctgtccggcatgcccggcaagacgagcttgcccggcaaggccagcttgcccggcaaggcaacgcaaggaggccagctgtgagcgcgcttcccttcgccttcgcctatccggccattctcggcgccctcgtggcgcttcccgtcatctggtggctgctgcgcctgaccccgccgcgcccgaaggccgaagtcttcccgccgctgcgcatcctcgccaccgtgctgaaacgcgaggaaacgccggcgcagagcccctggtggctgacgctgctgcgcatgcttctcgccgccgccgtcattctcgccatcgccgatccggtgttcaatccgcgcgcgagttcgatcgccccgggcggtccgctcgtgcttttcatcgacaatggctgggcgaccgcacccgattgggaacgccgcgttcagaccgccgaggcgctgatcgacgacgcggattcggcaagcctgccggtatccatcgcctttaccgccgacccgagcaacgatgcgctcgccggcaccgcagccgttgcccgcgagaggctccgcgccgccgaaccgcggccgctggtgcccgaccgccagcgcgccttcgtggcgttgcgcgcggcgcttgacggcgtcaagcccggcacgctcgccttcctgaccgacggcgccgccgcgaacgacaacgacgccaccgttcgccagctggccgacctgcagccggcgcagcttcggctgatcgcctccgacgcgacgcaaaccgtggcgataacggacgccaacaacgccgccgacgccatgaccgtcacggccacacgcctcgacagcgcctccgccgccaccctgccgctgaccgcccaggacgcgcagggccgcgccatcgcctcgggctccgtctctttccagcccggccagtccgtggcatcgggctcgatcacggcgcccttcgagatgcgcaacgacttcgcccgcgtcagcatcgacaatcacccgacggccggtgccgtccagcttctcgacgacggcttcaagcgccgccgcgtcgtgctcttgtcgggcgaggcaagcgacagcctgcagccgctgctgtcgccgctctactacatccagcgcgccctgcagccctatgccgatctgatcgagccgaacgccaccaatctcgccacctccatccccgatcttctggcgcagaacccctcggtcatcgtcatggccgatatcggccgcctgccgcaggagacctacgagccgctgcagcgctggatcaacaatggcggcacgctgatccgcttcgccggcccgcgcctggccgccgcccccgccgacgatccgctggttccggtcacgctgcgccagggcgaacgcgcgctcggcggcgccttgtcctgggccgagccgcagccgctggccgaattccccaatttcggccccttcgccggcatggcgcgcccgaccgacgtcacggtgaagcgccaggtgctggccgagccgacgccggacctggcggaacgcacatgggcaagcctcgccgacggcacgccgctggtgaccgtgaagccgatgaacgccggccgcatcgtgctcttccacgtcagcgccgaggccacctggtcggatcttccgatctcgggcaatttcgtcgagatgctgcgccgcatcgtgcaattgtcgcggtccggcggcgtcacctcgcaatccggcggcgcgacgaccgcagacgcgctgccgcccttccggctgttgaccgccaagggcgcgctcaccaccgaaaccggcgccgcgcggccgctgatccagaacgccaaggccgcccccgtggccggcttcgaaaatccgccgggcctctacggctccgaagaagggttcaccgccttgaacgtcctgccccagaacgccgaactcaagcccctcgacgcctcgggcgtgacgctggtgcgcgagggcctgatcggcggcgagacatggtcggccaaaccctcgctcttcctcatcgccttcctgctcctgctcgccgatagcctgatcgtcatgctcatgagcggcgccttctcgcgcctgcgcccagccgcgcgcacggcggcgatgatcgcggtggcggccggcgccgccttcctcgtccagcccggccagtcgcgcgccgacgacagcaagcccggcgatgaccagatcttccagcggctcgacaacacccaccttgcctatgtcgtcaccggcgagcccgaggtcgaccgcatctccgagcgcgggctcgagggtctcacgcaatatctgacattccgcaccacgctcgaaccgtccgctcccgtcggcctcgatatcaccaaggacgagctcgccttctatccgatcatctactggccgatctcggccaccgcgcccatgccgtcggccgcctcgatcaaccggatcgacgcctacatgcgctctggcggcaccgtgctcttcgacacccgcgaccagttcagcgccctcgacaacagcggcggcaccagccccaatggcgagcgcctgcagcagatcctcgccaatctcgacataccgccgctggagccggttccctccgatcacgtgctgaccaagtccttttaccttctgtcgagcttccccggccgctatgccggcagcccgctctggatcgaggcgcgtcaggacaaccgctccggcaacgccaagtcggcggcaacggccgacggcgtttcgccgatcctcatcactggcaacgatttcgccggcgcctgggccgtggacgacaatggcgtcccgatccttcccaccgtccccccggacgaggcgcagcgcgaatatgcctatcgcagcggcgtcaacatcatgatgtatatgctcaccggcaactacaagaccgaccaggtccatatccccgccctcctcgaacggctggggcagtgacatgacggttgatttcgcgcccttcatcccctggccgcttctggcaggcctcgccgtcatcgtcgtcgccatcgccgcgctcgctatcttcaggggcgtacgcggcgcctggatacgcagcatcgccgccctggccctgctcgccgcgctcgccaatccgcttctgatgcaggaggatcgcgaacagctctcgacgatcgtccccgtcatcgtcgaccgcagccagagccagcagacgccggagcgcgtcaagatgaccgacgacgcgctggcgcagctcaaggaccgtctggcccgcttcccgaacgtcgaggcacgctatgtcgatgccaccgagccggaagattccgacgcgccctcgacacgcctcttcaacgctctgtcggccgccgtcgccgacgttccgcccgcccgcatcggcggcgccatcatgatcagcgacggccagatccacgacgtgcccggcgtcaatcaggcgctcggcttcgacgccccgatccacggtctcatcaccggcaaggccaaggagttcgaccgccgcatcgaggtgatcaaggcgccgcgcttcggcatcgtcaacgaagagcagcaactggtgctgcgcgtcttcgacgatggcccgagccccggcggcaccgccgacgtcacggtcaagctgaacggcaacgagatcgcgacgctgcaggcaacacccggtcgcgacacacccttctccttcaaggtcgagcgcggcggcagcaacgtgctggaattctccgtggcggctctgccgggagaggtgacgcaagccaacaatcgcgccgtccacgtcatcgacggcatccgccagaacctgcgcgtgctgctggtctccggcgaaccgcacgctggcgagcgcgcctggcgcaacctgttgaaatccgacgcatccgtcgatctcgtgcacttcaccatcctgcgtccgccggaaaagcaggatggcacgccgatcaacgaactgtcgctgatcgccttcccgacgcgcgagctctttgtcgacaagatcaaggacttcgacctgatcatcttcgaccgctaccagcatcgcggcgtgctgccgatcctctattacgattacatcgcgcaatatgtccaaaacggcggcgcgctgctgatcgcggcgggtccggaacaggccggtccggattcgatcgcgctgacgccgctctcctccgtgctgcccgccgcgcccaccggcgagatgatcgaaaaagcgttctatccccgcctctccgacatcggaaagaagcaccccgtcacccgtggccttgatggttccaccgaagagccgccgcggtggggccgctggttccgcagcgtcggcgtcgaaaagcctcagggcgatacggtcatggtcggcgccgacaacaacccgctgctggtgctcaaccgcgccggccagggtcgcgtcgccatgctcctgtccgatcagggctggctctgggcgcgcggcttcgaaggcggcggtccgcacgtatcgctctatcgccgcatggcccactggctgatgaaggaaccggctctggaagaagaggcgctgaccgcgcgcgcttccggccgcacgctcgagatcacccgccagaccatcggcgacaatcccggcaacgccaccgtccgctacccctcgggcaagaccgagacgctgccgctcgtccagtccgagcccggcctcttcaaggccgagaaacgcatggacgaaatcggtctcttcgagatccgcaacggcgagatgagcacgatggtgcatgtcggcgccgtcgatgcgccggaattcaaggcaatgatctcgacgcccgatgtgctgaagccgatatcggacaagaccaggggcctcgtcacccgggtctccagcgaggacggcaacgtcacgatcccgccgatcctgccggtgcgcggccagatccgtgtcgccgacgacgaccgcatgcagatccgcctgaccaacgagacggtgctgaagggcatcaacacgctgccgctcttcgcgggctttgccggcgtcggcatcctgctgcttgccttcggcgccatgtggtggcgcgagggtcgctgacccgatgccgcaactcgaactgaccgccacgccctcccccgatgacctcgcggtcatcggcgagagcctcaccgccttcaaccacgccgatgtcggcccggccgatcgccggacgctggcggtgctgatccgcgacgaggagggaacggtgctaggcggcctctccggctacacagcctggggctggctcttcacgcagctgctgttcatccccgaaaaccatcgcggcaccggcctcgccggaaggcttctctcgatggccgaacaggaagcagccacccgcggctgccacggcgcctggatcgacaccttcagcccaaaggcgctccaagcctatcggaaacagggatacgagatcttcggcgaactgccggaattcccgaagggccgcacgcgcacgtttttgcgcaagacgctgacgcctgggccgtgtcggaccggcgctgaatagcggagcctgtcgcccgctttagagatgagcgatcttggcctcgacctcagtcagtcgcgactgaacctcttccgcgatgcgagaggcatgcgatgcatcgcgcaaggctgtcagcacctcattgtactgcccgaccacatcgatctgcatccgcttgaggtcatgggcgcggtcgtcgagaagcctttcggtctcttcaagcctcgtcgagatcgcctcaagccgacctgacgtctcgctgtgatgccgaagcgcgagctcgtgcaaactgttcattttgcgattgagcttagagatctcggtctcgaccgtgctaaacttgtcgatggcggcttcgaccatgcccaaggtccgcttctggccattgaacatggcttccatcatcgccagcattcttgccgtctcgctgtcgcccacgcgcctcgatcctccgttctcgttcaatatggcattacggcacgcaaacaacaagaaagcctgcccctcaggcgatcgacgcctgacgggtctctgaatcgatcgccaccgccgccagcgccgagacgacgaggaagccggcgaagaggccgatcgcaaccccaagcccttcggaaacgaccagcgccatcagcgacggcgcgagaagtccgccgagccgcgcaacggcgcccgccgtgcccatgccggtcgcccgcaccgcggtcgggtagagttccggcgtataggcatagagcgcgccccatgtcccaagcagcgcgaaactcatgatcagaagcgacgcgccgaccatgatatcgaccccggagacgacgaacagcaggcaccccgccgccgacagcaggcagaagccgatcagcgtcggcttgcggccccaggcctcgacaccgtaggcggcgagcgcgtagccggggatctgcgccagcgccacgaaaacaaggaagccatagccccgcacgaagccgaagccatcgcccgcgagcttcgccggcatccaggtgaagacgccgtaataggagaccgacaccaggaaccagatcaccaggatcatcgccgtgcggcggcgaagcgcgcccgaaaagacgccttcggaggccgcatgcggcggcgacaccagctcttcgtcggcgccgagcgccggcttgccgttggccaccagcacccggttgatcgtcgtcttcgcctcctcgccgcgaccgccgcgcagcaggtaaagcggcgattccggcacgaacagccgcaggccgagcccgaggatcgccggcagcgccgtcaccgcgaagatgtagcgccacgcatcctggaccccggcgacgctggccgcccatgccgcaagcgccacgatcagcgttccgatcgcccagaacccctcgagcgccaccagccagcggccacggcttttcgacggcaggaattccgccatcatcgcatagtcgaccggcagggtgccgccgacggccacgccggtgagaaacctgagagcgagcaggatggtgaaactcggcgcgaagaccgaaagcgccccgaacaccgcgtcgcaggcgaccgtcagcaacagcacgttgcgccgccccaccctgtcggccagccggccgaaggcgtaggcgccgatcagcatcccaaggaagaacagcgtgcccgtctgcagcgcctgcggcaccgtcagcccgaaactcgcggcgatcgacgcggcggtgaagccgaccgccagcacctgcatcgcatccgccgtccagacgagaccgaaaatgccgagaagccgccgctggaacggtccggtcccggcgcgatcgagcgcctcgtcgattgaaatgcgacccatgccttctccccctcaagccctgcgaaaaaccacgaaaagcacggtccttgtcatagctcaatagaacagatggcctatctgcgccagccgatcgtgcccttcagccggccatgcacgtccgcgccgagcggcaccaccagcacccggcccggatcgaccggccccggaaaggtcagcgcgttataggccaccttctcgaagccgagcggcccgtaatagggcggatcgccgacgaggatgacggcttgcgaccccttgcgcttggccgcctccaccgcgatccgcaccagttcccggccgatgccgcggttcttgtgcgaggggcgaacggcaagcgggccgagcagatggccgggcacgtcgccggccatgacgggcgtcatccgaacggaagcgatcgtctcgccgtcatcggcgcagatgaaggacagcgcgagatcatgcggcccctgctcgcggatgcgagcggcggcgcgcgtgtgccggcctgggccgaatgcttcttcgttgatgtgttcgatagcggcgtcgtgcgacgcgtcctcagtgaggtagaccagatcgtgcttgtgcatgaagagacagaaaccggatagacaaaatgatgggttctcgaacacgcccttgggcgttcgggagcatcagcgtcgtcgcagggttctgtatgcggacatcaatcgggttcctgaaatcgtggaaaggccgatagcaggaaaaaaatcggtcgtctacgggaaaacgtcacgcaggaggccaccgccgcggaaacggcgatggcggctggaatcaccccctcggccagcgctcgaccgtctggccgccgaacagccggctggtcggcatctggaagatgaaataggggttgagcagcggcagcgcgctcgcctgctccagccgctccagcatcgcctcgtcgagctctacatccagcgaagcgatgttctgctgcagctgctccatccggctggcgccgatcagcaccgaggaaacgccggcgcgccgcgccacccaggcaagcgccacctcggccgccgagcggcctgtctccgccgcgaccgagatgacgacatcgaccacatcgaaattgcgctcggtaaacagcatgccgccgaacggattgtcgccgttgagccggccgtcgctgccgctctccgatgtctccgaggttttgtcgggcaaggccgtggcgcgcccggcctcggccagcatttcccgaccgtatttccccgtcagcaggcccgccgcaagcgggctccagggcaccattccaaggccgaactctgcgccggcaggcatgagatcgagttcgacgccgcgatcgatcagcgaataggcgtattgaaggccgatcggcttcggcagcccgtgcgcctcggcaagcgtcgcgatccgcgccacataccaggccggcgtattggagaatccgtaatgcaggatcttgccggcccgcacggcatcggcaagcgtctgcaggacttcatcggccggcgtcgtctggtcccagacatgcatccagtacatgtcgatatagtcggtgcgcagccgctccagagatccctcgatgccgagacggatgttcttcgcgccgttgccgccccagagcggcgtgccctggccgcgtggaaatccggacttggtggcaatcaccagccggtcgcgccgtccgctatcggccaggaacgcaccgagcatctcctcgctctgccccgccgaatagatgtcggccgtgtcgatgaaattgccgccggcatcgacataggcgtcgaacagcacccgcgaggtctgctcgttggcgccccatcgcccggcgccgaaggtcatggttccgagcgccagcgggctgacgatcagtcccgagcggccgagggtgcgataactggtaaggtccatatccgtgctccttgttcacaccccaccatctaggccgacacgagccacgggattagcggttgccggccgcatgaacttgtgagcaagttgcagcaatggaacgcggaacactcaacgatctcctcgccttcgccgccgtcgcccgcgagcgcagctttacgcgcgcagcagccgtcctcggcatgtcgccctcggcactcagccacgcgatgcgcgcactggaggagcggcttggcgtccgcctgcttgcccgcaccacccgcagcgtggcgccgaccgaggccggagagcggcttctgcaatcgctcaaccccgcgcttgcggatatcgaaggcggattggaagcgctggccgaatggcgcgacaacccgtccggcacggtccgcatcaccaccttcgcctatgccgccagaatggtgctggtgccgaaacttccggctttcctgctcgcccaccccgatatccgcgtcgaggtgatcatcgaggacgggctgacggatatcgtaacctcaggcttcgacgccggcatccgccttggggaaacggtggacaaggatatgatcgcggtgcgcgtcgggccggaattgcgcaccgtcgtcgtcggcacgcccgcctatttcgcccgcatcccgccgcccgagacgccctatgatctcgagcgccacgcctgcatcggctaccgcctgacgacctccggcgggctgctcccctgggagttcgaaaaggacggcaaggagatcaagatccgcaccagcggcccgctcgtcgtcaacgacggcgagcttccggcagccgccgtgcgagaaggcgtcgggctcggttatctgatggagcacgacgtcgccgacgagattgcctccggcgcgctggtgcaggtgctcgacgactggtgcccgcccttcccgggcttccacctctatcacccgagccgccgccagtcgccgccggcgctgcgcgcgctgatcgcggccttgatcgtcaagtagcagtcgcggagcgatgcccaatcggcgcgtgacgcactgttcaatcattgtcccactgcaaattcggcccgaacgcgatatctacaagggcaacgaaggatcgaaggagtagacaccatgggtatgctggtcgacggcgtgtggcaggacgtctggtacgatacgaaggagaccaagggtcacttcaagcgcgccgcctcgcagttccgcaactggatcacgccggatggcggcgccggtccgtcgggcaaggcaggcttcaaggccgaggccgggcgctatcatctctacgtatcgcttgcctgtccctgggcgcaccgcacgctgattttccgcaagctgaaaaggctgcaggaccttatcacggtttccgtcgtcgatccgctgatgctggaaaaaggctgggaattcaatgtcggcgacggcgccaccggcgatccgctgtttaacgccaggacgctgtccgacatctacgtgaaggccgatccgcattattccggccgcgtcaccgtgcccgttctgtgggacaggaagaccgacaccatcgtcagcaacgagtcggccgagatcatccgcatgttcaacagcgccttcgacgcgctgaccggctcgaccgccgatttctaccccgacgaccttcgcggcgagatcgacgacctgaacgcgcttatctacgacaccgtcaacaacggcgtctacaaggccggcttcgccaccacgcaggacgcctattcgcaaagcgtggtcacgctcttcgaaacgctcgacatgctggaagatcgcctcggcaagggccgctatctgttcggcgaccggctgaccgaggccgactggcggcttttcaccacgctggtgcggttcgaccctgtctatgtcggccacttcaagtgcaatatccgccgcatcgccgattatccgaacctctcggcctatctgcgcgatctctaccagacgcctgacatcaaggagacggtcgacttccgtcacatcaaggaccactactaccgcagccacaagacgatcaacccgacgggtatcgtccccgtgggcccggcgcaggatctcgaccgcccgcacggccgcggcgaacgcgccgccgcctaagcaaaggcaatccggcccggcctaccagacctggtcgggctgctgctcgccggcgatttcggcaagacgacggcgggtcgaccccgtcgttccctcagggagcgcgtcgagcgcgaagaaaccgcattcgacgatctcgcggtcaggcgccctcggtgccgtctgccgcacattggcgcggtagaacacgacatggtcgcgccgcgtcgccgccttgttgaagtagacctgcacgagcgccggccgtccgacaatcaccagattgccctcctcgcgcagttccttgaccagcgcgtcctcggccgtctcgttgcgttcgatgccgccgcccggcatgtgccagccgggcacgtagctgtgccgcacgagaaacacgtagcccctgtcatcgaagcaggcggcgcgcacgcccatggtcattccacgcgcccaggcgaagtaaaaatggaccacgcgcatcatgaggcgcgattgccaatggcggatttctttcacgcgtcttccaattccatcaatccgttcaagcagatgtgcgaggagatgtgtttgaaatacggcggccgtgagctatgtgtgcacccatgttcaagctcgcgcacatctcagacatccatctcggcccgctgccccatctctcgttccgcgaactcttttccaagcgtatcaccggctttgtgaactggcatcgcaatcggcgcaagcaccttttcggcggcacgctggatctcctgctcgacgatatccgcgaaaggcagccggatcacctggcgattacgggcgatctcgtcaatctcgcgagcggcctcgagatccgcgccgcggccggctggctgcgcgaactcggcgatcccagggattactccgtcgttcccggcaatcacgatgcctatgtgcccggcgcctacgaaaagtcgatgcgcgcgtggtatcacaacgtctgcggcgacctcgcccccgccgaatggcaggaaaacaagcacatcttcccctatctgcgcattcgcgacaaagtggcgatcgtcggctgctcgacggcggttgcgaccccgcccttcgccgccagcggcttcttcggcgaaagacaggcccgcgagaccgtgaacatgctgcgcgccgccggcgaagccgggctgtttcgcgtcgtcatgatccaccatccgccgatccgtggcgccacctccttccacaagcgcatgatcggcattagacgtttcgcggccgtcatctccaccggcggcgccgaactcgtgctgcatggccacacgcacctgaacacggtacactggctgcgcggccagaccggaccggtcccggtcgtcggcatcgcctccggctcgcagggtcccggcggctccaagccgcccgccgcatacaatcttttcagcatcgacggctcccccggcgcctggagcctgaagggcgaacgtttcagcctcagcccgtcgggcgacgacatcaacccggaaagcgtcgatatcttcaggctttagcggcgtttccggaatcagtttcgcggcaagttgaatcaccgcgcgaagacggcgaaaaaccaccgatcggaccccgtcgcctcttggtatttccggatctaggcgtacactcgctatattagcgatccataccaggagatgtcgcatgccatccacgatccccacgctgcgcggcctggcgctcgccggctgcctcgcgctgagcttctcggccactgccttcgccgccggcgaggagaccgacgaaaccaagccgccgccgaagacccaaaccacgacgaagtgcaccggcggcaaggtctgggacaagaagaagaaggaatgcgtcacgccgaacaagcagagcttcaacgacgacgatctctacagggccgcccgcgaattctcctatgccggccagtacgacaccgccatcacggtgctgaagctcgcccgtaaccaggatgatccgcgcatcctgaattacctcggctacgccaaccgcaaggccggccggatggagcttgggatgtcctattatcgcaaggcactgcaggcggacgagaattatattctcgcgcggtcatatatgggccaggctttgatggaacagggtgatgtcgagggcgcgcgcgttcagctcgtcgagatccgcgaccgtggcggcgagaacagctgggcctatcgctcgcttctgcagtcgctcaacggctacagaacctattgagcctgccggatcacccggaaaaaagctttgggaacccgtgagataagcggccttttgcttgcgaagcagcggcgacttgtttcataaaggacacagagaagagataattcgcacctgcgccgggtaaaggcttacgatacccggcattcatcttgggaaaaccatgcgtcaacctgtgacgaccatcgatatcagacgcgatctcgtggggcttctgcctcggttgcggcggttcgcgatgacgctcgcgggtgatgcggcgggcgccgacgaactcgtccaggtcgcctgtcagcgcgcgatcgccaagagcagccagtggcagggcgaaggccggctcgacagctgggtctacacgctgatgcgccagcaatgggccgaggatcaccgcaggcgcaggccgcacgccgtcaacaagaccaacgtcaccgacattcgcacggccacgcgcgaccgcgccgccatcgtcgattccgacgcgatccaccggatgatatcggacatgcccgatggcatcgccagcgccttcctgctggtttcgatcgaagggcatggctaccagcaggccggcgacatcatgggcgtcgcccccaccctcatcatgtcgcagctggcgcaggcgaaaatgcacttcgccagcctcgccgacgaccactcccacaggttctgatttgcccgatttcaagaaactgccgctcgacgcccagctgaccgccctcctcgacggcgagacgacgcccgagcagaagcatgagctggaacagcgcctggcaaccgacgacggcgcgcggcggatattcgacaagctgcgccacggggccgatttcggcaagcgccggctcgaagacatcctgaaggaaccggttccgttggcgctggtgcgctcgatcaagagcgtgcagccgcccaaggcggccgtcgcgccgcgcgtttcgcgccagccgttcaaattcgcgccgacgggtctccaggcgttggtcggcgccatcgtgctcctcatcgccggctgcggcatcggctatatcgtcggcaccggccagaccgccgcgcagacggcgcaggccgtcgatgccgcccagcaggccaacgacgccacggagtggctgggcgacatgctggccaaccagcggctgctcgcccgccagccgcgccatatcttcgaagtcccggccacgcagccggaggaaatctccacctggctgacgacgtccgtcggcgtcgccttccgcgtccccgatctggtggccgagggatggaccttccagggcgcacgcgtgacgctcgccggcaaccgccccgtcggtcagctgatctacaccagcaacgacggcgatctggccaccatcgccttccgcaaggacaaccagcccgacgatgctgaggatttcaaggaaaccatccgcgatgagatcggccttgtcacctggcacaatgccggcacctcctacatgctgatcggcccctcctccgacgcatccctcagccaactcgccatgcagatcgccaccgcgatttgacggcaaggtgccgtcaacggtggcggtcaacgtgctcgccgcctagtgtctcgccgcaaacctctccaccctcatccctgtgctcgtcacagggatccagcgcgatcaagtccttgatcgcaaaagactattttcgccgcacagacgcgcgtcggctggatcccggcacaaggccgggatgaggaaacgatgggaatgaggccgccaagcagccgccgatcaagccttgccggccttcacgtcgagcacccggttcgccgccgagacgatcgcttccagcgacgcgccgacgatattggtgctgatgccggcgccgaagagcttgccgccgggataggacgtctcgacgtaggagatcgccgaggcgttcgaaccgtgctgcagcgagtgttcggaataatcctgcaccgccatctcgaccccgagatactccgagagcgcattgatgaagccgtcgatcgggccgttgccgcggccttcgatcgtcttcgtcacgccattgtcggtgatctcggcggaaaccacgcgaacgccacggcgctcgggatcggcgaaggtctggtgatcgacgaacttgatgcggcccttcggctgcgtcacgtagcgctcgatgaagtggtcgtagatccgcttcgacggcagttccttgccctcttcgtcggtgatccgctggatctcctcgcgatactccacctgcaggttgcgcggcaggttgaggccgtaatcctgttgcaggatataggcgatgccgcccttgcccgactgcgaattgatgcggatgatcgcctcgtagctacgcccgacgtcctgcggatcgatcggcagatacggcacttcccagaccgggtggttggcgaccttgatcgccttcatgcccttgttgatcgcatcctggtgcgagccggagaaagccgtatagaccagttcgccgacgtaaggatggcgctcgccgatcggcatctggttggaatattcgaacacgtccttcatgcgcacgatatccgagcagtcgatttctggatccacaccctgcgtgaacatgttgagcgccatcgtcaccacgtcgacattgccggtgcgctcgccattgccgaacaacgtcccctcgacacggtcggcgcccgccagcaaggccagctcggcggcggcgatgccggtgccgcggtcgttatgcgggtgcagcgagatgatcaggttctcgcgattgtcgagattgcggcacatccattcgatctggtcggcatagatgttcggcgtcgccatttcgacggtcgacggcaggttgatgatcagcttgttgtcgggcgtcggcttcatcacctcgatgaccgcattgcagatctccagcgccacgtcgagttcggtgccggtgaagctctccggcgaatattcgaagcgatagccgccaccggcctttgccgccatgtcggaaatcatcttcgccgcatcgaccgcgatctgcttgatgccgttgacgtccttggcgaacaccacgcgccgctgcagttcgctggtcgagttgtagaagtgaacgatcggcttgttggcgccctgcaaggcctcgaaggtgcgcgtgatcagctcgggacggcactgcaccagcacctgcagcgacacgtcgtcgggaacgttgccctcctcgacacaccagcgcgcgaagtcgaaatcggtctgcgaggccgacgggaagccgatctcgatttccttgaagcccatgtcgagcagcagctggaacatccgcgccttgcggtcgtgacccatcgggtcgaccagagcctggttgccgtcgcgcagatccaccgagcaccagatcggcgccttggtcagcgtcttggtcggccatgtgcgatcggggatgttgacctgcggataagggcgatacttcatcgccgcgtcaggcatgccgtgggagcgggtcttcgtgtccatgtcttctcttcctattcccgtcatctggccgcgtcatagcgcatggcctgcctgttggcgatgacgaatccggcgcaaggcgtccggttgatcgatttttgggatatgtgaagaggagctatggccggcaggctttgggccgccgggcgctcctcaacggacccggcaaccgcgcgtaaggccgaggagaagaagcgaggtcagggcgcgcgtattgtcgcgcagggcgatacgcccgcgtgcaatctgctcagaaatcatgatgcccgtgctcttcatgccggcctgtatagccgccgcgcgaaaaactggcaagtggccggctattttttccgcgtttgcacaaatcgctgcaacgccatcatcagcccaccggccagcagcccccagaaggcgccggagatgccgccgaaggagacgccggacgctgtcaccaggaatgtgattgcagccgcttcccgcgtatcgggcgcctggaaggccgccatggcggagccggagaaggcgccgaccagcgccagccccgccaccgcctggatcaggatcggcggagcgagcgccaccgatgcggtcacggcacccgcgagcggcccgaggatcagatagcagacgccgcagacgatgaccgcccagtagcgtcgctttggattgggatgcgcgtccggtccggcgcacatcgcagccgtgatcgccgccaaattgacggcatggccaccgaagggggccgagagcagcgagaagaaaccggtcgaggcaaagagcggcccgggcttggtctcatagccattgaccttcatcaccgcgatgccaggaatattctgcgaggccatggtgacgatgaagagcggcagcgcgatcgacacgaaggcaggcacgttgaacaccggcatgacgaattcgaccgtcggcaccagcgactggcgaaccgtatcgagcgcgccctcgggcacatcgacgccgaagaccacgaccagcacgaaggccgccagcgccgccggcaccgcccacaggcgcttgaacgcgccgacgacgatccaggcaagcacgatcggcagcccgagcagcggattgaacccgatcgccttgaccggcgcgaagcagagcccgatcagcacccccgccagcatcgcattggccagcggcgccggtatcgccgccaccgcccgcccgagcggccgaaacagcccggcgatgacgatcagaagcgcgcagacgatgaaggccccgaccgctgcattgaacccgccctcgaccaccccggtcgaagccagaagcgccccccccggcgtcgaccaggccatgctgatcggcagcctggaggttgcgctaagcacgatcgcgcaaatcccgagcgcgaccgacagcgccatcaaccccgaagccgcctgagcctcgctcgccccaaccgcctgcaacccatgcagcacgacggcgaacgaactggcgaaaccgacgaaagcggtgaggacgcccatgaacagggcctgcacggagaagtctttaagcatgagaaggtctcgggggcgaggatgacgcgtcatgcagccgtatcgcaaaccttggcgcaaggccagatacacccactgccctcattctcgcccttgtggcgggaatccagccgacgcgcgtccgcgcggcgaaagactcttcccggcacaaggccgggatgaggggcaccttgaagcacccccacaaacaaaaaaagcgccctcgcccgccgtccggcagccgagggcgcttcgtctcgttcgatcagatttcgctctgcgacgtcacgatgcgcgagaccaggccataggccttggcttcctcggccgacagccagtagtcgcggtcggtgtcggcggcgatcttctcgtagggctggccggtggcggcggacatgatcttgttgaggcgctcgttcatcttgatgatctcgcgtgcctggatttcgatgtcggacgccatgccgcgcgtgccgcccgagggttggtgcagcaggaagcgggtgttgggcaggcaaaggcgctgctccttgggcgcggcgacgtagatcagcgcgccggccgaagcgacccagccggttccgatcatccagaccttcggcttgatgaacttgatcatgtcgtggatcgaatcgccggactcgacgtggccgccgggcgaattgacgtagatgcggatgtcctcgtcgctggccgcggcaagcgccacgagctgcgagcagaccttctgcgccagttcctggttgatcggtccatagatgaagatggaacgcgacttgaaaaggttcgcctccgtttccttgccgagcggcagttccttcgtcttgtcgtcctggtcttcgtcgttcattcgaacctctctcacgtaaattcgggttccccgcacatagtgcgactcaatgcgtaaaacaatgcgtgaaaaagacaagccacggaacgggtgaagatatggtttaggcccggatgttcgcaggccgggcttactgaaatgtaacccgtcgaggctttgaaaagtctcaatccgcacctacgtccttctcaagcgtccatgcggacccgcccccaggaaccgcatgcgaacacgcagcaaaggagacagccgatgtcacccgaagaacgccaactcctgaccgcccttttcgagcgcgtccgcaccgccgcctcgaccccgcgcgaccgcgaggccgaacagctggtcgatcaaagcacccgcgagcagccctattcagcctattatctggcccaggccgtgatcgtgcaggagaagggcctcgaggccgccgccgacaggatcaggcagttggaggaccgcgtccgccagttggaggcggaccagagcgacagccacaaggccgagcagggcggcggctttctctcctcgatcttcggcagcagccagccgccgcagcagcggcaacagccagcgccgacggaaggcgtgtctggcccctggggcagcgccccgcgccaacagatccgcgagaaccagggcttcgacaccgccccgcgcatgcagcagcaaccttccggcccctggaacccgcagatgtcgtcgccatcggccggcggcagcttcctgcagggcgcgctcggcaccgcggccggcgtcgccggcggcatgctgcttgccaattcgctgagcggcatcttcggcggcaaccatatggcctcgctcggcctcggctccggcgcctcgcccgcgagcgcgcccacggaagagaccgtcatcaacaactattatagcaatgacggcggccagcaggcctccggcgacgccgacactacgcgccaggtcgccgataacaacgacaacgacaacgacgacagcggcctccagcaggccgattacgacaacagcgacgacggcttcgacgatcagtccgacttcggcggcgacgacagctccagcgcctagcctggataggatatgcctatggcaagtttcggtgagcgcgcgggccggccgattgataagcgcttgccgcatcggtaaggtccgccccgatcatcgaacagaagaccatatcgggcgggacagcagtgaagaccctcatcatcagccgcaaggccgaggacaccaggcggcgctttcagacgcggcagatgcaggcgctcggcctcgatttcgagtttctcgatgccttcgaggcccgcgacctgacgccggaggagtgccagaaggcggcaaacagctggccgagcccgacgctgcgcgaggatatcgcctgcttcacctcacatcgcatcgcctggcgcagggtcatcgacggcggaaaacgcatgctgatccttgaggacgacgcggtgctgtcggaaagcatcgtcgatgcccttgccggcatcgaggcgcgcccggacgcagacgacatcgcctatgatctcgaattcgcgccgcgcgatcatatcctggccaaacggccgctctggaccgacggcatctattgcgcccggcgcgtgttccagaaccgggttggcctggcaggctatgtcgtcggtccgggtgccgccgcgcgcatgttgaaggataccgaaacctacggcctgctcgacgcttatatctggcaccgcgcctggctgaaagcctaccagatcgagcccgcccccgtcatccagatgcagttcctcgacggcagcgccgacaaggcggccttcatccgcaagtcgatcgaccgcgccttcaagccgggcaagctgcgcaagaacctgctcaggctgaagatcgagggcatcagggcccgcaacctgatccgtggctggctcaggagcgagaggcggccgttgcgcatggaccgcgcgagtttccccgccgatcccgccaagcctgccgattgatttcagccgcgaccacgataggtcgcgaccccctggtcgggcaaccatacgccctcgggcggcttgccggtctgccagaacacatcgatcggtatgccgccgcgcggataccagtaggcgccgatcctcagccacttcggatcgagcagctcgacgatacgcttggcgatgtagatcgagcagtcctcgtggaaggcgccgtggttacggaaggaatgcaggaagagcttcagcgccttggattccaccagccattcgttgggaatgtaatcgatgacgatatgggcgaaatccggctgcccggtcatcgggcagagcgaggtgaactcgggcgcggtgaagcgcacgacgtaatcggtgccggcattgctggcgggcaccttctcgagcaccgccgtttccggcgagctcggcgcttcggtctgttttcccagcatggacaggctggagacgtctgtattgggcattcaagcctccttgatgactttgacgcggatgccgtggtcggtttcgccctccggctcgacgtgaatggcgatgctggcgcccggatgcacggcgcggatggcatcctcgaggcaatcgcagatatcgtgcgcctgccttacagacattgcggccggcacgacaagatggaaatcgacgaatgtgacggtgccggcgcgccgggtcttcaggtcgtgcacgccgagcgagcccgtcgcatgggtggcgatcgcctgcttgatcgcctcctcctcctgaggctcgaccgcctggtccatcagcccgccgatcgaatgcgaaatcaccttccagccctgaaacaggatgttgatggcgacgagaatggcgagaagcgggtcgaagatcgcatagcccgtcgccagcgccagaacaaggccgatcagaacgccgatggaggtgatcacgtcggacatgacatgctggccatcggccgtcagcgccgccgagcgatacttgcgcccggtccggatcagggtctgcgcccaaacggcattgatcacggcggcgagaaagttgatggcaaggccgagcaccggcgcatcgagcatgcgcggattggcgagatggccgaccgccgcctggacgatcagcagcgccgcgacgacgatcaggacaccctcggtgacggccgaaagatattccgccttgtggtgaccgaaatgatgatcatgatcggccggccgctgcgcgtagcggatgacgaagaaggcgatgaaggcggcaacgacgttgaccgacgattccagcccgtccgacaaaagcgccaccgacccggtgacccaccaggccaccagcttcagccccatgacgccgagcgacatcgggatgctccagaatgccagcttccgaaccgtgaggttgccctgtccgctcatctctctccctccgtctgtgcgatgtccaaaccggtgcggatgcgaacgaattgcagaaacaatgccgttcaaacgcaaaaccgcccgcgcgaaaatcgcgcaggcggccattgctggggatatgcgcccaaaatggcgatttgtcaaagtggaagtgtttgggtggcgaggcgtcacgcttgtctagagcggatgcggcctccgcgtcgcgaaaacgttctctggcctggggtcatcgaaccgagggcggcaaagcgcccccgctccaacggaaaatagctcatgccgcgcttctacgggaagatgatctttgtcggcctacttgcgccccttgcagtcccactctccggcaatgcggctgaccgattgtttgagggacagtggcaaaaatctgaaggagcgccggagactatccggatcatccagtacggtgagactactgcgattttcagtaaagcaggatgggcgatggcgtctctacagcctgagactggcggcgtgctggcattgggagagggaaaatggacaatcaccgccaacagcccccctacgaacgtacgcgtcactgtaggatatcgtaacgaccgcctgtatctgcttgtaacgccgaaggatgaaggtggctccacggagtacaagatcatcttcgaacgggtggagcccaaatccaaaaatcggagggcatgactgcttagggtcgactgctgccttccgcttcgcgccagaagcggacatctggctgcaaccaatcttatcgacttgaaccccgaccgcgtagcggcctcgattgctcacaaacaccaccataacgtgattttcttgctccagataattggcgggctctgccttggggaagaggccgagagacggggtagaatgccttctcgatcacccctccctgatttcttgcccgcgacagttcatagaaatccgctaaaaacagattaaattactgatataaatcaataatatatgttgccggagagacacgaagtcgcggtgaagttggctgcggcccggaattcctaatttaccttcttgcgattgacacacgaaccggcgacacatccgcgcgaactaaatttcgtttttaaaaaacaactttatagcgacgaggtaggcggcgtgcgtggtatcctgaattctcgaaaatccgtgttttttgctggggtgagcgttttggcgctaggtgttggtgccacgctctctcctgctttggccgccacctatacggccggcaccgaagcggaattgagcagcgccattgccggtgccaacgccgacggcgatgccaatgcgacaattaagctgacgggcaaccttgcaaccaccggagtgatgccatcgccctcgaagccaatcacgatcgacacgcagggctttacactttcaggcttccaggcactgagctccaacggccaggcgctggtcttttccggcaccgcggttggaggcactgcacagcgtggattctacttcactgccacgaccgtggcgacgaacttcgtcaataacggctcgataaccggcggtgccgatggaagtgctacgaccagctcgggtatctcgtttgctggcacaggcacctttgtcaacaatggaacggtgaccggcggtgaagacatatcggccggcgtcggcggtggcagcggaattgttgcccagagagccatggccattacaaacaacggcctgatccaaggtggcaacagcgcgtctagcgctggcgggataggcgtgaatcttggtggattcgcgacagccgctgtcccagcgtcactgatcaacaacggcacgattatcggtggcaccggggcttcaggtggcggaacaggtgtccgtctcgcgactggcgcaacctatctcgagaacaacggcacgatcatcggcggcaccggctccaacgggatcaccttcaccatcgccaatacctatatcgtaaacagcggaattattcgaggcggggctggtgccaccaacgccattggcattggaagtccgggagcaagcctgaccttggagcttcgcgagggctccgatatcaccggctatgtcatcggaagcgccaccgtgtcggatagactgcgcctcggtgggtccgggaccgacagtttcgacatctcacaagttggcaacacgctcgcctatcagtatcgcaacttcgacgtcttcgagaaaacgggcaccggaacttggactctcaccggggcggccacgtccgccacggactggacggtgtatgacggcacgctgcttgtcggcgacgccggcacgacggccagcattctcggcaacatcgacaaccgggccaccctcggcggcagtggcaccatcgtcggcaatgtcacgaactccggcaccgtagcgcccatcggcacactgaccatctccggcgactacatcggcggtggcggcaccgttgccatcgacgcggcgcttgcgggtgacgcgtccaccaccgatcggctcgtcgtcacgggcgatactgccggcaccggcaccgtccgtgtcaccaatcttggtggcagcggtgcacagacggtcgagggtatcaagatcatcgatgtcggcggcatttccgctggcacgttcacgctcgccggcgactacgtctacaatggcgagcaggccgtcgtcggcggtgcctatgcataccgcctctaccagaacggcgtttcaacgccggtcgatggcgactggtatttgcgctcggtgcttctcgatccggcattgggcacgaccacgccgctctatcagccaggcgtcgcgatctatgaagcatatcccgaaatgctgcaggcgctgaacgggctcggcacgttgaagcagcgcgtcggcgatcgttattggcgcacggcaaccgatccggttgcggcaagcggccccgatggcgtctggttccgcaccggcggcatgcatggtggcgtcgatcccggtttcagcaccagcggcggcagctatgactacaacctttggaaatccgagggtggcgtcgatggcgagctgttccagaacgatagtggccgcctgatcggtggtgtttccgctcaccttggcacgatctcgggcgacatcagctcgatctatggcaacggcaaggtcgacacgctgggatacggcgtgggcgcgacactgacctggtatggcgaggacggcttctacgcggatgcccagagccaggcgacgttctacgacaccgacctgaaatccgatctgcttgacggctccctgactgatggtaacagcggcttcggctatgccttgagcatcgagaccggacggcggttcgcgacctcgggcgcatggaccatcaccccgcaggcccagctcgtctattcctcggtaaacttcaatgacttccgcgatcgcttcggcgccgccgtttcgctcgatcgtggtgacagcctgaatggtcgcatcggcgtggcgctggatcacgacgcgagctggcagcgcgccgatggcaagacggcaaatgccaagctctatggctcggccgatctctattacgagttcctcgatggctccgccgtcaacgtggcggatctcgtcttcggaagcgagaacgaccgactggccgctggcatcacgctgggcggtgaatatagctggaacgatggccgcacgtcggtctatggcgaggtgatcgcgcgctcgtcgctggagaatgtcggcgacagctacactgtcggcggcacggcaggcctgcgagtgaagtggtagtgcgcgttttgtcggcccattgcggaaatgttcgcaatgggccggaagcagaaccggcgccgcgccgctattccccgccctcacccgcatcaccaaccaccaccgtctgcggccagcgcagcaaggccgcctcgcctgcctcgttcagcgcatagacgccctttccctgccggtcgaaccagccatagacgttgtcgagcaggatgcggcccgcctgcggcgcccatgtcttcatgtcgcgcggccgcgccaacccctgttgcagcgcagaggcgcagatcagcgcctgttgccggtaggcggtcatgatcggcgagcgcgtggcgccaccgagcgccggatcgccttgtcttttccgatgctccctgacaagccgtgtgcgccgcttcgggttggtcctcggcatcggcgatacggagctgacgatgacgctgacctcgccggtatcggatatccccagcatgccgatccccatccgccggcagagatcgcggtagcgcctgtccgcctcccgcccccggcccttggccgagaccttcgccgcgatccagacttcatcggccatcgccgcccggtcgacggcctgcaggataagctcgagattgaacgacatcttcaattcgcagacgacaacgaccggcggttcgccgtcgctcagccccacgacatcgcagctcgcgacctcccccttcacgacatagccggccgcctccagaaaggccttcaccggcggatagagcgaggtctccatcgcgcgggctctacggattgagatcggcgatctcgccgaactgggccagcagccgtggcgacagcatgtcgccggtctcctcgtcgacggtgatcgcataggccgccacgcccgcgaagcgctccgccatggcggacgcgatcttctccgcgctgatcgggttcgacgcctgccgcatctcgccgggcaccagcttgccgcgattgctgcggtaagggatcacgataaacttttcaccagtggacacgcgcaggattcccgattgatcgttcctgaaacgttctgatttgagggcggatgtcaatggtctgggcgggtgaaagcatgggtcgaggctgcgttacccccctcagccctggcaaaccgagccgcgatccttcccaacagacccaaagagcggaaattgaagcgatcggcatcatggcattgaccgtcaaacggctctaaattgagtgaaggaattattgcgtcggaccggcctgcgtcccggatacgccagcaacgcaatcaggcaggagaccaccagtgacccacagcctcgaccgccccgcctggaacgcgcttctgaccgttcatgccgatctcgctgaaggcggcccgcttgcgatgcgttatccgacctccatcgtccccttcgccgcgccccgcgacgacacgcccgagagcctggaagcgctggcggccctcaccgcgccgggcgagatcatggcgctggtcgaggccgacccaatcaccgtgcctgatggccacgatgtgctgatcgaaagcacgctggtgcagatgatcggcggccggccatatgaacgcatcgaagacatgagcatcgagccgctcacacccgacgatgccgaggagatgctggcgctggcgacgctgacgaaacccggccccttcacgctcggcgcccagcgcctcggcaccttctggggcgtcaagatcgacggccgccttgcggccatggccggccagcgcatgcgccatcccggcctctccgaactgagcggcctctgcacccaccccgatttccagaaacgcggcctcggcaccctgctcttccgcttcgtcgccggcgaaatcacggcgcgcgatgaagaggtgttcctgcacgcctatgccagcaatacatcggcgatcgcgctctacgagcagctgggtttcaagctgcgcagccggatgaatgtgaagatcgtgcagcggcgggggtgaggtttctgcggggctggggacttcgccggcattgtcgccaggattacccccctctgccctgccgggcatctcccccaca

(The sequence listing continues in the following parts.)
